(19) United States
(12) Patent Application Publication
(10) Pub. No.: US 2023/0257753 A1
(43) Pub. Date: Aug. 17, 2023

(54) PRODUCTS AND COMPOSITIONS

(71) Applicant: Sirnaomics, Inc., Germantown, MD (US)

(72) Inventor: Dmitry SAMARSKY, Germantown, MD (US)

(21) Appl. No.: 18/170,971

(22) Filed: Feb. 17, 2023

Related U.S. Application Data
(63) Continuation of application No. PCT/US22/47420, filed on Oct. 21, 2022.
(60) Provisional application No. 63/271,057, filed on Oct. 22, 2021.

(51) Int. Cl. C12N 15/113; A61K 45/06

(52) U.S. Cl. CPC C12N 15/1137; A61K 45/06; C12N 2310/14; C12N 2310/351; C12N 2310/315; C12N 2310/51

(57) ABSTRACT

Nucleic acid products that modulate, interfere with, or inhibit PCSK9 and APOC3 gene expression are provided, together with compositions containing the constructs and methods for their use.

### CROSS REFERENCE TO RELATED PATENT APPLICATIONS

[0001] This application is a continuation of international application PCT/US2022/47420, filed Oct. 21, 2022, which claims the benefit of and priority to U.S. Provisional Patent Application No. 63/271,057, filed Oct. 22, 2021, the contents of each of which are incorporated herein by reference in their entireties.

### SEQUENCE LISTING

[0002] The instant application contains a sequence listing, submitted electronically in ST.26 (XML) format, is hereby incorporated by reference in its entirety. The ST.26 sequence listing, created on Dec. 8, 2022, is named 4690_0056I_SL and is 2674 kilobytes in size.

### FIELD

[0003] Nucleic acid products are provided that modulate, interfere with, and/or inhibit PCSK9 and APOC3 gene expression. Methods, compounds, and compositions are provided for reducing expression of PCSK9 and APOC3 mRNA and protein in an animal. Such methods, compounds, and compositions are useful to treat, prevent, or ameliorate PCSK9- and APOC3-associated disorders such as dyslipidemia, more specifically hypercholesterinemia, hypertriglyceridemia, hyperchylomicronemia, and atherosclerotic cardiovascular disease (ASCVD).

### BACKGROUND

[0004] Cholesterol has multiple vital functions, including the maintenance of integrity and fluidity of cell membranes. It furthermore serves a precursor for biosynthetic pathways, including those leading to steroid hormones and vitamin D. Cholesterol is present in the blood, where it occurs mainly in two forms: as component in high density lipoproteins (HDL) and in low density lipoproteins (LDL). Often the HDL cholesterol is referred as “good” or beneficial, while LDL cholesterol, especially when present in elevated levels, presents a health risk and lead to disease. Proprotein convertase subtilisin/kexin type 9 (PCSK9) is a serine protease involved in lipid metabolism. PCSK9 reduces the number of LDL receptors on the surface of liver cells. As a consequence, elevated amounts and/or activity of PCSK9 entail higher blood levels of “bad” LDL cholesterol. This molecular and cellular function of PCSK9 has led to its recognition as a therapeutic target.

[0005] Triglycerides are esters of glycerol with three fatty acids. They serve as storage of fat and energy and are transported via the bloodstream. Excess level of blood triglycerides have been recognized early on as causative agents or bystanders of a range of disorders. More recent evidence suggests a causative role, partly in conjunction with elevated levels of cholesterol (especially LDL cholesterol) in ASCVD and disorders subsumed under this term or associated therewith. A more comprehensive list of disorders associated with elevated levels of triglycerides is given in the embodiments disclosed further below.

[0006] Apolipoprotein C3 is secreted by the liver and the small intestine. It can be found on triglyceride-rich lipoproteins including very low density lipoproteins (VLDL) and chylomicrons. It is involved in the negative regulation of lipid catabolism, especially triglyceride catabolism, and of the clearance of VLDL, LDL and HDL lipoproteins. A molecular function of APOC3 is the inhibition of lipoprotein lipase and of hepatic lipase.

### Disease

[0007] Abnormal amounts of circulating cholesterol, in particular of LDL cholesterol, also referred to as hypercholesterolemia, is a recognized disorder in itself which is inter alia owed to the fact that such abnormal amounts, especially if they persist over extended periods of time, may entail disorder of the cardiovascular system. More specifically, excess amounts of cholesterol may deposit on the inner walls of blood vessel which in turn may lead to clogging, where the clinical manifestations of such clogging include myocardial infarction, stroke and peripheral artery disease.

[0008] Also abnormal amounts of circulating triglycerides, also referred to as hypertriglyceridemia, is a recognized disorder in itself which is inter alia owed to the fact that such abnormal amounts, especially if they persist over extended periods of time, may entail disorders of the cardiovascular system and/or inflammation.

### Treatment

[0009] Established treatments for the exemplified disorder disclosed above include the administration of statins. However, statins may cause side effects, and certain patients are statin-intolerant. There therefore remains a need for therapies to treat lipid dysregulation and associated diseases including PCSK9- and APOC3-associated diseases. We, therefore, aim to provide compounds, methods, and pharmaceutical compositions for the treatment of such diseases.

[0010] Double-stranded RNA (dsRNA) able to complementarily bind expressed mRNA has been shown to be able to block gene expression (Fire et al, 1998, Nature. 1998 Feb. 19; 391 (6669):806-1 1 and Elbashir et at., 2001, Nature. 2001 May 24; 41 1 (6836):494-8) by a mechanism that has been termed RNA interference (RNAi). Short dsRNAs direct gene-specific, post-transcriptional silencing in many organisms, including vertebrates, and have become a useful tool for studying gene function. RNAi is mediated by the RNA-induced silencing complex (RISC), a sequence-specific, multi-component nuclease that destroys messenger RNAs homologous to the silencing trigger loaded into the RISC complex. Interfering RNA (iRNA) such as siRNAs, antisense RNA, and micro-RNA are oligonucleotides that prevent the formation of proteins by gene-silencing i.e., inhibiting gene translation of the protein through degradation of mRNA molecules. Gene-silencing agents are becoming increasingly important for therapeutic applications in medicine.

[0011] According to Watts and Corey in the Journal of Pathology (2012; Vol 226, p 365-379) there are algorithms that can be used to design nucleic acid silencing triggers, but all of these have severe limitations. It may take various experimental methods to identify potent siRNAs, as algorithms do not take into account factors such as tertiary structure of the target mRNA or the involvement of RNA binding proteins. Therefore, the discovery of a potent nucleic acid silencing trigger with minimal off-target effects is a complex process. For the pharmaceutical development of these highly charged molecules it is necessary that they can be synthesised economically, distributed to target tissues, enter cells and function within acceptable limits of toxicity. An aim is to, therefore, provide compounds, methods, and pharmaceutical compositions for the treatment of thromboembolic diseases as described herein, which comprise oligomeric compounds that modulate, in particular inhibit, gene expression by RNAi.

### SUMMARY

[0012] Nucleic acid products are provided that modulate, interfere with or inhibit, PCSK9 and APOC3 gene expression, and associated therapeutic uses. Specific oligomeric compounds and sequences are described herein.

### BRIEF DESCRIPTION OF THE FIGURES

[0013] FIG. 1a shows a concentration dependence of PCSK9 in vitro inhibition by certain muRNA constructs of Table 7a, and by other compounds (TMPRSS6, 91conv31A and MK4K4 G8) as a negative control.

[0014] FIG. 1b shows a concentration dependence of APOC3 in vitro inhibition by certain muRNA constructs of Table 7a, and by other compounds (TMPRSS6, 91conv31A and MK4K4 G8) as a negative control.

[0015] FIG. 1c shows a concentration dependence of PCSK9 in vitro inhibition by certain muRNA constructs of Table 7b, and by other compound M4K4 G8 as a negative control and PC1aas a reference compound.

[0016] FIG. 1d shows a concentration dependence of APOC3 in vitro inhibition by certain muRNA constructs of Table 7b, and by other compound M4K4 G8 as a negative control and PC1aas a reference compound.

[0017] FIG. 1e shows a concentration dependence of PCSK9 in vitro inhibition by muRNA construct A28-P44 versus PC1 and TMPRSS6.

[0018] FIG. 1f shows a concentration dependence of APOC3 in vitro inhibition by muRNA construct A28-P44 versus PC1 and TMPRSS6.

[0019] FIG. 2a shows in vivo inhibition of APOC3 expression in mice using certain muRNA constructs of Table 7b.

[0020] FIG. 2b shows in vivo inhibition of PCSK9 expression in mice using certain muRNA constructs of Table 7b.

### DETAILED DESCRIPTION AND EMBODIMENTS

[0021] The following aspects are non-limiting:

[0022] Aspect 1. A nucleic acid construct comprising at least:

[0023] (a) a first nucleic acid portion that is at least partially complementary to at least a first portion of an RNA which is transcribed from a PCSK9 gene;

[0024] (b) a second nucleic acid portion that is at least partially complementary to at least a second portion of an RNA which is transcribed from a APOC3 gene;

[0025] (c) a third nucleic acid portion that is at least partially complementary to said first nucleic acid portion of (a), so as to form a first nucleic acid duplex region therewith;

[0026] (d) a fourth nucleic acid portion that is at least partially complementary to said second nucleic acid portion of (b), so as to form a second nucleic acid duplex region therewith.

[0027] Aspect 2. A composition comprising a construct according to aspect 1, and a physiologically acceptable excipient.

[0028] Aspect 3. A pharmaceutical composition comprising a construct according to aspect 1.

[0029] Aspect 4. A construct according to aspect 1, for use in human or veterinary medicine or therapy.

[0030] Aspect 5. A construct according to aspect 1, for use in a method of treating a disease or disorder.

[0031] Aspect 6. A method of treating a disease or disorder comprising administration of a construct according to aspect 1, to an individual in need of treatment.

[0032] Aspect 6a. A use of a nucleic acid construct according to aspect 1 in the manufacture of a medicament for a treatment of a disease or disorder.

[0033] Aspect 7. Use of a construct according to aspect 1, for use in research as a gene function analysis tool.

[0034] Further embodiments (items) are described below by way of example only.

[0035] It will be understood that the benefits and advantages described herein may relate to one embodiment or may relate to several embodiments. The embodiments are not limited to those that solve any or all of the stated problems or those that have any or all of the stated benefits and advantages.

[0036] Features of different aspects and embodiments may be combined as appropriate, as would be apparent to a skilled person, and may be combined with any of the aspects as described herein. Advantageous and/or exemplary features of the constructs are as follows:

[0037] 1) they contain multiple (2 or more) at least partially double-stranded agents that trigger RNA interference, tied together into a single nano-structure predominantly through complementary (Watson-Crick) interactions;

[0038] 2) optionally, other (e.g.) covalent bindings may be used to build the constructs and/or add various ligands (e.g., delivery/targeting moieties such as GalNAc and or other carbohydrates, cholesterol, peptides, or small molecules, optionally attached via linkers);

[0039] 3) the constructs predominantly comprise chemically modified nucleotides (e.g., 2′F, 2′OMe, LNO, PNA, MOE, BNA, PMO, phosphorothioate, phosphodithioate, etc. etc), mostly (but not only) to increase resistance to nucleases;

[0040] 4) the constructs contain “fragile” components (e.g., chemical linkers, unmodified nucleotides, etc), which allow the constructs to disassemble upon exposure to certain biologic environments (e.g., exposure to extra- and/or intra-cellular fluids); specific examples include, but are not limited to: a) cleavage of the oligo backbone by nucleases in the sites with non-modified nucleotides; b) cleavage of the chemical linkage due to the change of pH (e.g., in endosomes);

[0041] 5) disassembly upon exposure to said certain biologic environments releases the active components (e.g., said at least partially double-stranded agents that trigger RNA interference) to modulate (up- or down-regulate, optionally down-regulate) target gene expression in cells/organisms;

[0042] 6) said constructs can be used to modulate, optionally down-regulate or silence gene expression, to study gene function, or to treat various diseases associated with the target genes to be down-regulated.

### Definitions

[0043] Unless specific definitions are provided, the nomenclature used in connection with, and the procedures and techniques of, analytical chemistry, synthetic organic chemistry, and medicinal and pharmaceutical chemistry described herein are those well known and commonly used in the art. Standard techniques may be used for chemical synthesis, and chemical analysis. Certain such techniques and procedures may be found for example in “Carbohydrate Modifications in Antisense Research” Edited by Sangvi and Cook, American Chemical Society, Washington D.C., 1994; “Remington's Pharmaceutical Sciences,” Mack Publishing Co., Easton, Pa., 21^{st} edition, 2005; and “Antisense Drug Technology, Principles, Strategies, and Applications” Edited by Stanley T. Crooke, CRC Press, Boca Raton, Fla.; and Sambrook et al., “Molecular Cloning, A laboratory Manual,” 2^{nd} Edition, Cold Spring Harbor Laboratory Press, 1989, which are hereby incorporated by reference for any purpose. Where permitted, all patents, applications, published applications and other publications and other data referred to throughout in the disclosure are incorporated by reference herein in their entirety.

[0044] Unless otherwise indicated, the following terms have the following meanings:

[0045] As used herein, “excipient” means any compound or mixture of compounds that is added to a composition as provided herein that is suitable for delivery of an oligomeric compound.

[0046] As used herein, “nucleoside” means a compound comprising a nucleobase moiety and a sugar moiety. Nucleosides include, but are not limited to, naturally occurring nucleosides (as found in DNA and RNA) and modified nucleosides. Nucleosides may be linked to a phosphate moiety, phosphate-linked nucleosides also being referred to as “nucleotides”.

[0047] As used herein, “chemical modification” or “chemically modified” means a chemical difference in a compound when compared to a naturally occurring counterpart. Chemical modifications of oligonucleotides include nucleoside modifications (including sugar moiety modifications and nucleobase modifications) and internucleoside linkage modifications. In reference to an oligonucleotide, chemical modification does not include differences only in nucleobase sequence.

[0048] As used herein, “furanosyl” means a structure comprising a 5-membered ring comprising four carbon atoms and one oxygen atom.

[0049] As used herein, “naturally occurring sugar moiety” means a ribofuranosyl as found in naturally occurring RNA or a deoxyribofuranosyl as found in naturally occurring DNA. A “naturally occurring sugar moiety” as referred to herein is also termed as an “unmodified sugar moiety”.

[0050] A “naturally occurring sugar moiety” or an “unmodified sugar moiety” as referred to herein has a —H (DNA sugar moiety) or —OH (RNA sugar moiety) at the 2′-position of the sugar moiety, especially a —H (DNA sugar moiety) at the 2′-position of the sugar moiety.

[0051] As used herein, “sugar moiety” means a naturally occurring sugar moiety or a modified sugar moiety of a nucleoside. As used herein, “modified sugar moiety” means a substituted sugar moiety or a sugar surrogate.

[0052] As used herein, “substituted sugar moiety” means a furanosyl that has been substituted.

[0053] Substituted sugar moieties include, but are not limited to furanosyls comprising substituents at the 2′-position, the 3′-position, the 5′-position and/or the 4′-position. Certain substituted sugar moieties are bicyclic sugar moieties.

[0054] As used herein, “2′-substituted sugar moiety” means a furanosyl comprising a substituent at the 2′-position other than H or OH. Unless otherwise indicated, a 2′-substituted sugar moiety is not a bicyclic sugar moiety (i.e., the 2′-substituent of a 2′-substituted sugar moiety does not form a bridge to another atom of the furanosyl ring).

[0055] As used herein, “MOE” means —OCH₂CH₂OCH₃.

[0056] As used herein, “2′-F nucleoside” refers to a nucleoside comprising a sugar comprising fluorine at the 2′ position. Unless otherwise indicated, the fluorine in a 2′-F nucleoside is in the ribo position (replacing the OH of a natural ribose). Duplexes of uniformly modified 2′-fluorinated (ribo) oligonucleotides hybridized to RNA strands are not RNase H substrates while the ara analogs retain RNase H activity.

[0057] As used herein the term “sugar surrogate” means a structure that does not comprise a furanosyl and that replaces the naturally occurring sugar moiety of a nucleoside, such that the resulting nucleoside sub-units are capable of linking together and/or linking to other nucleosides to form an oligomeric compound which hybridizes to a complementary oligomeric compound. Such structures include rings comprising a different number of atoms than furanosyl (e.g., 4, 6, or 7-membered rings); replacement of the oxygen of a furanosyl with a non-oxygen atom (e.g., carbon, sulfur, or nitrogen); or both a change in the number of atoms and a replacement of the oxygen. Such structures may also comprise substitutions corresponding to those described for substituted sugar moieties (e.g., 6-membered carbocyclic bicyclic sugar surrogates optionally comprising additional substituents). Sugar surrogates also include more complex sugar replacements (e.g., the non-ring systems of peptide nucleic acid). Sugar surrogates include without limitation morpholinos, cyclohexenyls and cyclohexitols.

[0058] As used herein, “bicyclic sugar moiety” means a modified sugar moiety comprising a 4 to 7 membered ring (including but not limited to a furanosyl) comprising a bridge connecting two atoms of the 4 to 7 membered ring to form a second ring, resulting in a bicyclic structure. In certain embodiments, the 4 to 7 membered ring is a sugar ring. In certain embodiments the 4 to 7 membered ring is a furanosyl. In certain such embodiments, the bridge connects the 2 ‘-carbon and the 4’-carbon of the furanosyl.

[0059] As used herein, “nucleotide” means a nucleoside further comprising a phosphate linking group. As used herein, “linked nucleosides” may or may not be linked by phosphate linkages and thus includes, but is not limited to “linked nucleotides.” As used herein, “linked nucleosides” are nucleosides that are connected in a continuous sequence (i.e., no additional nucleosides are present between those that are linked).

[0060] As used herein, “nucleobase” means a group of atoms that can be linked to a sugar moiety to create a nucleoside that may be incorporated into an oligonucleotide, and where the group of atoms is capable of bonding, more specifically hydrogen bonding, with a complementary naturally occurring nucleobase of another oligonucleotide or nucleic acid. Nucleobases may be naturally occurring or may be modified.

[0061] As used herein the terms, “unmodified nucleobase” or “naturally occurring nucleobase” means the naturally occurring heterocyclic nucleobases of RNA or DNA: the purine bases adenine (A) and guanine (G), and the pyrimidine bases thymine (T), cytosine (C) (including 5-methyl C), and uracil (U).

[0062] As used herein, “modified nucleobase” means any nucleobase that is not a naturally occurring nucleobase.

[0063] As used herein, “modified nucleoside” means a nucleoside comprising at least one chemical modification compared to naturally occurring RNA or DNA nucleosides. Modified nucleosides can comprise a modified sugar moiety and/or a modified nucleobase.

[0064] As used herein, “bicyclic nucleoside” or “BNA” means a nucleoside comprising a bicyclic sugar moiety.

[0065] As used herein, “locked nucleic acid nucleoside” or “LNA” means a nucleoside comprising a bicyclic sugar moiety comprising a 4′-CH₂—O-2′bridge.

[0066] As used herein, “2 ‘-substituted nucleoside” means a nucleoside comprising a substituent at the 2’-position of the sugar moiety other than H or OH. Unless otherwise indicated, a 2′-substituted nucleoside is not a bicyclic nucleoside.

[0067] As used herein, “deoxynucleoside” means a nucleoside comprising 2′-H furanosyl sugar moiety, as found in naturally occurring deoxyribonucleosides (DNA). In certain embodiments, a 2′-deoxynucleoside may comprise a modified nucleobase or may comprise an RNA nucleobase (e.g., uracil).

[0068] As used herein, “oligonucleotide” means a compound comprising a plurality of linked nucleosides. In certain embodiments, an oligonucleotide comprises one or more unmodified ribonucleosides (RNA) and/or unmodified deoxyribonucleosides (DNA) and/or one or more modified nucleosides.

[0069] As used herein, “modified oligonucleotide” means an oligonucleotide comprising at least one modified nucleoside and/or at least one modified internucleoside linkage.

[0070] As used herein, “linkage” or “linking group” means a group of atoms that link together two or more other groups of atoms.

[0071] As used herein “internucleoside linkage” means a covalent linkage between adjacent nucleosides in an oligonucleotide.

[0072] As used herein “naturally occurring internucleoside linkage” means a 3′ to 5′ phosphodiester linkage. As used herein, “modified internucleoside linkage” means any internucleoside linkage other than a naturally occurring internucleoside linkage. A “modified internucleoside linkage” as referred to herein can include a modified phosphorous linking group such as a phosphorothioate or phosphorodithioate internucleoside linkage.

[0073] As used herein, “terminal internucleoside linkage” means the linkage between the last two nucleosides of an oligonucleotide or defined region thereof.

[0074] As used herein, “phosphorus linking group” means a linking group comprising a phosphorus atom and can include naturally occurring phosphorous linking groups as present in naturally occurring RNA or DNA, such as phosphodiester linking groups, or modified phosphorous linking groups that are not generally present in naturally occurring RNA or DNA, such as phosphorothioate or phosphorodithioate linking groups. Phosphorus linking groups can therefore include without limitation, phosphodiester, phosphorothioate, phosphorodithioate, phosphonate, methylphosphonate, phosphoramidate, phosphorothioamidate, thionoalkylphosphonate, phosphotriesters, thionoalkylphosphotriester and boranophosphate.

[0075] As used herein, “internucleoside phosphorus linking group” means a phosphorus linking group that directly links two nucleosides.

[0076] As used herein, “oligomeric compound” means a polymeric structure comprising two or more substructures. In certain embodiments, an oligomeric compound comprises an oligonucleotide, such as a modified oligonucleotide. In certain embodiments, an oligomeric compound further comprises one or more conjugate groups and/or terminal groups and/or ligands. In certain embodiments, an oligomeric compound consists of an oligonucleotide. In certain embodiments, an oligomeric compound comprises a backbone of one or more linked monomeric sugar moieties, where each linked monomeric sugar moiety is directly or indirectly attached to a heterocyclic base moiety. In certain embodiments, oligomeric compounds may also include monomeric sugar moieties that are not linked to a heterocyclic base moiety, thereby providing abasic sites. Oligomeric compounds may be defined in terms of a nucleobase sequence only, i.e., by specifying the sequence of A, G, C, U (or T). In such a case, the structure of the sugar-phosphate backbone is not particularly limited and may or may not comprise modified sugars and/or modified phosphates. On the other hand, oligomeric compounds may be more comprehensively defined, i.e., by specifying not only the nucleobase sequence, but also the structure of the backbone, including the modification status of the sugars (unmodified, 2′-OMe modified, 2′-F modified etc.) and/or of the phosphates.

[0077] As used herein, “nucleic acid construct” or “construct” refers to an assembly of two or more, such as four oligomeric compounds. The oligomeric compounds may be connected to each other by covalent bonds such phosphodiester bonds as they occur in naturally occurring nucleic acids or modified versions thereof as disclosed herein, or by non-covalent bonds such as hydrogen bonds, optionally hydrogen bonds between nucleobases such as Watson-Crick base pairing. Advantageously, a construct comprises four oligomeric compounds, two of which are connected covalently, thereby giving rise to two nucleic acid strands which nucleic acid strands are bound to each other by hydrogen bonds. Complementarity between the strands may be throughout, but is not necessarily so. Specific embodiments provide for an antisense strand targeting PCSK9 to be connected covalently with a sense strand of an APOC3-targeting double stranded RNA molecule, and of the antisense strand of the APOC3-targeting double stranded RNA molecule to be connected covalently to a sense strand of a PCSK9-targeting double stranded RNA molecule. Since antisense and sense strands of the parent single-target-directed RNA molecules do not need to have the same length and optionally do not have the same length with antisense portions being longer than sense portions, advantageously the construct contains a central region where the 3′ regions of the antisense portions of the parent single-target-directed RNA molecules face each other. In that region generally no or only partial base pairing will occur, while full complementarity is not excluded. Otherwise, where antisense and sense portions of the respective parent RNA molecules face each other, there is complementarity, optionally full complementarity or 1 or 2 mismatches.

[0078] The term “strand” has its art-established meaning and refers to a plurality of linked nucleosides, the linker not being particularly limited, but including phosphodiesters and variants thereof as disclosed herein. A strand may also be viewed as a plurality of linked nucleotides in which case the linker would be a covalent bond.

[0079] As used herein, “terminal group” means one or more atom attached to either, or both, the 3′ end or the 5′ end of an oligonucleotide. In certain embodiments, a terminal group comprises one or more terminal group nucleosides.

[0080] As used herein, “conjugate” or “conjugate group” means an atom or group of atoms bound to an oligonucleotide or oligomeric compound. In certain embodiments, a conjugate group links a ligand to a modified oligonucleotide or oligomeric compound. In general, conjugate groups can modify one or more properties of the compound to which they are attached, including, but not limited to pharmacodynamic, pharmacokinetic, binding, absorption, cellular distribution, cellular uptake, charge and/or clearance properties.

[0081] As used herein, “conjugate linker” or “linker” in the context of a conjugate group means a portion of a conjugate group comprising any atom or group of atoms and which covalently link an oligonucleotide to another portion of the conjugate group. In certain embodiments, the point of attachment on the oligomeric compound is the 3 ‘-oxygen atom of the 3’-hydroxyl group of the 3′ terminal nucleoside of the oligonucleotide. In certain embodiments the point of attachment on the oligomeric compound is the 5′-oxygen atom of the 5′-hydroxyl group of the 5′ terminal nucleoside of the oligonucleotide. In certain embodiments, the bond for forming attachment to the oligomeric compound is a cleavable bond. In certain such embodiments, such cleavable bond constitutes all or part of a cleavable moiety.

[0082] In certain embodiments, conjugate groups comprise a cleavable moiety (e.g., a cleavable bond or cleavable nucleoside) and ligand portion that can comprise one or more ligands, such as a carbohydrate cluster portion, such as an N-Acetyl-Galactosamine, also referred to as “GalNAc”, cluster portion. In certain embodiments, the carbohydrate cluster portion is identified by the number and identity of the ligand. For example, in certain embodiments, the carbohydrate cluster portion comprises 2 GalNAc groups. For example, in certain embodiments, the carbohydrate cluster portion comprises 3 GalNAc groups. In certain embodiments, the carbohydrate cluster portion comprises 4 GalNAc groups. Such ligand portions are attached to an oligomeric compound via a cleavable moiety, such as a cleavable bond or cleavable nucleoside. The ligands can be arranged in a linear or branched configuration, such as a biantennary or triantennary configurations. An optional carbohydrate cluster has the following formula:

[chemical structure]

wherein in said structural formula one, two, or three phosphodiester linkages can also be substituted by phosphorothioate linkages.

[0083] As used herein, “cleavable moiety” means a bond or group that is cleaved under physiological conditions. In certain embodiments, a cleavable moiety is cleaved inside a cell or sub-cellular compartments, such as an endosome or lysosome. In certain embodiments, a cleavable moiety is cleaved by endogenous enzymes, such as nucleases. In certain embodiments, a cleavable moiety comprises a group of atoms having one, two, three, four, or more than four cleavable bonds. In certain embodiments, a cleavable moiety is a phosphodiester linkage.

[0084] As used herein, “cleavable bond” means any chemical bond capable of being broken.

[0085] As used herein, “carbohydrate cluster” means a compound having one or more carbohydrate residues attached to a linker group.

[0086] As used herein, “modified carbohydrate” means any carbohydrate having one or more chemical modifications relative to naturally occurring carbohydrates.

[0087] As used herein, “carbohydrate derivative” means any compound which may be synthesized using a carbohydrate as a starting material or intermediate.

[0088] As used herein, “carbohydrate” means a naturally occurring carbohydrate, a modified carbohydrate, or a carbohydrate derivative. A carbohydrate is a biomolecule including carbon (C), hydrogen (H) and oxygen (O) atoms. Carbohydrates can include monosaccharide, disaccharides, trisaccharides, tetrasaccharides, oligosaccharides or polysaccharides, such as one or more galactose moieties, one or more lactose moieties, one or more N-Acetyl-Galactosamine moieties, and/or one or more mannose moieties. Advantageously, the carbohydrate is N-Acetyl-Galactosamine.

[0089] As used herein, “strand” means an oligomeric compound comprising linked nucleosides.

[0090] As used herein, “single strand” or “single-stranded” means an oligomeric compound comprising linked nucleosides that are connected in a continuous sequence without a break there between. Such single strands may include regions of sufficient self-complementarity so as to be form a stable self-duplex in a hairpin structure.

[0091] As used herein, “hairpin” means a single stranded oligomeric compound that includes a duplex formed by base pairing between sequences in the strand that are self-complementary and opposite in directionality.

[0092] As used herein, “hairpin loop” means an unpaired loop of linked nucleosides in a hairpin that is created as a result of hybridization of the self-complementary sequences. The resulting structure looks like a loop or a U-shape.

[0093] As used herein, “directionality” means the end-to-end chemical orientation of an oligonucleotide based on the chemical convention of numbering of carbon atoms in the sugar moiety meaning that there will be a 5′-end defined by the 5′ carbon of the sugar moiety, and a 3′-end defined by the 3′ carbon of the sugar moiety. In a duplex or double stranded oligonucleotide, the respective strands run in opposite 5′ to 3′ directions to permit base pairing between them.

[0094] As used herein, “duplex” means two or more complementary strand regions, or strands, of an oligonucleotide or oligonucleotides, hybridized together by way of non-covalent, sequence-specific interaction therebetween. Most commonly, the hybridization in the duplex will be between nucleobases adenine (A) and thymine (T), and/or (A) adenine and uracil (U), and/or guanine (G) and cytosine (C). The duplex may be part of a single stranded structure, wherein self-complementarity leads to hybridization, or as a result of hybridization between respective strands in a double stranded construct.

[0095] As used herein, “double strand” or “double stranded” means a pair of oligomeric compounds that are hybridized to one another. In certain embodiments, a double-stranded oligomeric compound comprises a first and a second oligomeric compound.

[0096] As used herein, “expression” means the process by which a gene ultimately results in a protein. Expression includes, but is not limited to, transcription, post-transcriptional modification (e.g., splicing, polyadenlyation, addition of 5′-cap), and translation.

[0097] As used herein, “transcription” or “transcribed” refers to the first of several steps of DNA based gene expression in which a target sequence of DNA is copied into RNA (especially mRNA) by the enzyme RNA polymerase. During transcription, a DNA sequence is read by an RNA polymerase, which produces a complementary, antiparallel RNA sequence called a primary transcript.

[0098] As used herein, “target sequence” means a sequence to which an oligomeric compound is intended to hybridize to result in a desired activity with respect to PCSK9 and/or APOC3 expression. Oligonucleotides have sufficient complementarity to their target sequences to allow hybridization under physiological conditions.

[0099] As used herein, “nucleobase complementarity” or “complementarity” when in reference to nucleobases means a nucleobase that is capable of base pairing with another nucleobase. For example, in DNA, adenine (A) is complementary to thymine (T). For example, in RNA, adenine (A) is complementary to uracil (U). In both DNA and RNA, guanine (G) is complementary to cytosine (C). In certain embodiments, complementary nucleobase means a nucleobase of an oligomeric compound that is capable of base pairing with a nucleobase of its target sequence. For example, if a nucleobase at a certain position of an oligomeric compound is capable of hydrogen bonding with a nucleobase at a certain position of a target sequence, then the position of hydrogen bonding between the oligomeric compound and the target sequence is considered to be complementary at that nucleobase pair. Nucleobases comprising certain modifications may maintain the ability to pair with a counterpart nucleobase and thus, are still capable of nucleobase complementarity.

[0100] As used herein, “non-complementary” in reference to nucleobases means a pair of nucleobases that do not form hydrogen bonds with one another.

[0101] As used herein, “complementary” in reference to oligomeric compounds (e.g., linked nucleosides, oligonucleotides) means the capacity of such oligomeric compounds or regions thereof to hybridize to a target sequence, or to a region of the oligomeric compound itself, through nucleobase complementarity.

[0102] Complementary oligomeric compounds need not have nucleobase complementarity at each nucleoside. Rather, some mismatches are tolerated. In certain embodiments, complementary oligomeric compounds or regions are complementary at 70% of the nucleobases (70% complementary). In certain embodiments, complementary oligomeric compounds or regions are 80%>complementary. In certain embodiments, complementary oligomeric compounds or regions are 90%>complementary. In certain embodiments, complementary oligomeric compounds or regions are at least 95% complementary. In certain embodiments, complementary oligomeric compounds or regions are 100% complementary.

[0103] As used herein, “self-complementarity” in reference to oligomeric compounds means a compound that may fold back on itself, creating a duplex as a result of nucleobase hybridization of internal complementary strand regions. Depending on how close together and/or how long the strand regions are, then the compound may form hairpin loops, junctions, bulges or internal loops.

[0104] As used herein, “mismatch” means a nucleobase of an oligomeric compound that is not capable of pairing with a nucleobase at a corresponding position of a target sequence, or at a corresponding position of the oligomeric compound itself when the oligomeric compound hybridizes as a result of self-complementarity, when the oligomeric compound and the target sequence and/or self-complementary regions of the oligomeric compound, are aligned.

[0105] As used herein, “hybridization” means the pairing of complementary oligomeric compounds (e.g., an oligomeric compound and its target sequence). While not limited to a particular mechanism, the most common mechanism of pairing involves hydrogen bonding, which may be Watson-Crick, Hoogsteen or reversed Hoogsteen hydrogen bonding, between complementary nucleobases.

[0106] As used herein, “specifically hybridizes” means the ability of an oligomeric compound to hybridize to one nucleic acid site with greater affinity than it hybridizes to another nucleic acid site.

[0107] As used herein, “fully complementary” in reference to an oligomeric compound or region thereof means that each nucleobase of the oligomeric compound or region thereof is capable of pairing with a nucleobase of a complementary nucleic acid target sequence or a self-complementary region of the oligomeric compound. Thus, a fully complementary oligomeric compound or region thereof comprises no mismatches or unhybridized nucleobases with respect to its target sequence or a self-complementary region of the oligomeric compound.

[0108] As used herein, “percent complementarity” means the percentage of nucleobases of an oligomeric compound that are complementary to an equal-length portion of a target nucleic acid. Percent complementarity is calculated by dividing the number of nucleobases of the oligomeric compound that are complementary to nucleobases at corresponding positions in the target nucleic acid by the total length of the oligomeric compound.

[0109] As used herein, “percent identity” means the number of nucleobases in a first nucleic acid that are the same type (independent of chemical modification) as nucleobases at corresponding positions in a second nucleic acid, divided by the total number of nucleobases in the first nucleic acid.

[0110] As used herein, “modulation” means a change of amount or quality of a molecule, function, or activity when compared to the amount or quality of a molecule, function, or activity prior to modulation. For example, modulation includes the change, either an increase (stimulation or induction) or a decrease (inhibition or reduction) in gene expression.

[0111] As used herein, “type of modification” in reference to a nucleoside or a nucleoside of a “type” means the chemical modification of a nucleoside and includes modified and unmodified nucleosides. Accordingly, unless otherwise indicated, a “nucleoside having a modification of a first type” may be an unmodified nucleoside.

[0112] As used herein, “differently modified” mean chemical modifications or chemical substituents that are different from one another, including absence of modifications. Thus, for example, a MOE nucleoside and an unmodified naturally occurring RNA nucleoside are “differently modified,” even though the naturally occurring nucleoside is unmodified. Likewise, DNA and RNA oligonucleotides are “differently modified,” even though both are naturally-occurring unmodified nucleosides. Nucleosides that are the same but for comprising different nucleobases are not differently modified. For example, a nucleoside comprising a 2′-OMe modified sugar moiety and an unmodified adenine nucleobase and a nucleoside comprising a 2′-OMe modified sugar moiety and an unmodified thymine nucleobase are not differently modified.

[0113] As used herein, “the same type of modifications” refers to modifications that are the same as one another, including absence of modifications. Thus, for example, two unmodified RNA nucleosides have “the same type of modification,” even though the RNA nucleosides are unmodified. Such nucleosides having the same type modification may comprise different nucleobases.

[0114] As used herein, “region” or “regions”, or “portion” or “portions”, mean a plurality of linked nucleosides that have a function or character as defined herein, in particular with reference to the claims and definitions as provided herein. Typically such regions or portions comprise at least 10, at least 11, at least 12 or at least 13 linked nucleosides. For example, such regions can comprise 13 to 20 linked nucleosides, such as 13 to 16 or 18 to 20 linked nucleosides.

[0115] Typically a first region as defined herein consists essentially of 18 to 20 nucleosides and a second region as defined herein consists essentially of 13 to 16 linked nucleosides.

[0116] As used herein, “pharmaceutically acceptable carrier or diluent” means any substance suitable for use in administering to an animal. In certain embodiments, a pharmaceutically acceptable carrier or diluent is sterile saline. In certain embodiments, such sterile saline is pharmaceutical grade saline.

[0117] As used herein, “substituent” and “substituent group,” means an atom or group that replaces the atom or group of a named parent compound. For example a substituent of a modified nucleoside is any atom or group that differs from the atom or group found in a naturally occurring nucleoside (e.g., a modified 2′-substituent is any atom or group at the 2′-position of a nucleoside other than H or OH). Substituent groups can be protected or unprotected. In certain embodiments, compounds of the present disclosure have substituents at one or at more than one position of the parent compound. Substituents may also be further substituted with other substituent groups and may be attached directly or via a linking group such as oxygen or an alkyl or hydrocarbyl group to a parent compound.

[0118] Such substituents can be present as the modification on the sugar moiety, for example a substituent present at the 2′-position of the sugar moiety. Unless otherwise indicated, groups amenable for use as substituents include without limitation, one or more of halo, hydroxyl, alkyl, alkenyl, alkynyl, acyl, carboxyl, alkoxy, alkoxyalkylene and amino substituents. Certain substituents as described herein can represent modifications directly attached to a ring of a sugar moiety (such as a halo, such as fluoro, directly attached to a sugar ring), or a modification indirectly linked to a ring of a sugar moiety by way of an oxygen linking atom that itself is directly linked to the sugar moiety (such as an alkoxyalkylene, such as methoxyethylene, linked to an oxygen atom, overall providing an MOE substituent as described herein attached to the 2′-position of the sugar moiety).

[0119] As used herein, “alkyl,” as used herein, means a saturated straight or branched monovalent C₁₋₆ hydrocarbon radical. Advantageously, methyl is the alkyl substituent at the 2′-position of the sugar moiety. The alkyl group typically attaches to an oxygen linking atom at the 2′position of the sugar, therefore, overall providing an —O-alkyl substituent, such as an —OCH₃ substituent, on a sugar moiety of an oligomeric compound as described herein. This will be well understood be a person skilled in the art.

[0120] As used herein, “alkylene” means a saturated straight or branched divalent hydrocarbon radical of the general formula —CₙH₂ₙ— where n is 1-6. Methylene or ethylene are examples of alkylenes.

[0121] As used herein, “alkenyl” means a straight or branched unsaturated monovalent C₂₋₆ hydrocarbon radical. Ethenyl or propenyl moieties are examples of alkenyls as a substituent at the 2′-position of the sugar moiety. As will be well understood in the art, the degree of unsaturation that is present in an alkenyl radical is the presence of at least one carbon to carbon double bond. The alkenyl group typically attaches to an oxygen linking atom at the 2′-position of the sugar, therefore, overall providing a —Oalkenyl substituent, such as an —OCH₂CH═CH₂ substituent, on a sugar moiety of an oligomeric compound a as described herein. This will be well understood be a person skilled in the art.

[0122] As used herein, “alkynyl” means a straight or branched unsaturated C₂₋₆ hydrocarbon radical. Ethynyl is an example of an alkynyl as a substituent at the 2′-position of the sugar moiety. As will be well understood in the art, the degree of unsaturation that is present in an alkynyl radical is the presence of at least one carbon to carbon triple bond. The alkynyl group typically attaches to an oxygen linking atom at the 2′-position of the sugar, therefore, overall providing an —O-alkynyl substituent on a sugar moiety of an oligomeric compound as described herein. This will be well understood be a person skilled in the art.

[0123] As used herein, “carboxyl” is a radical having a general formula —CO₂H.

[0124] As used herein, “acyl” means a radical formed by removal of a hydroxyl group from a carboxyl radical as defined herein and has the general Formula —C(O)—X where X is typically C₁₋₆ alkyl.

[0125] As used herein, “alkoxy” means a radical formed between an alkyl group, such as a C₁₋₆ alkyl group, and an oxygen atom wherein the oxygen atom is used to attach the alkoxy group either to a parent molecule (such as at the 2′-position of a sugar moiety), or to another group such as an alkylene group as defined herein. Examples of alkoxy groups include without limitation, methoxy, ethoxy, propoxy, isopropoxy, n-butoxy, sec-butoxy and tert-butoxy. Alkoxy groups as used herein may optionally include further substituent groups.

[0126] As used herein, alkoxyalkylene means an alkoxy group as defined herein that is attached to an alkylene group also as defined herein, and where the oxygen atom of the alkoxy group attaches to the alkylene group and the alkylene attaches to a parent molecule. The alkylene group typically attaches to an oxygen linking atom at the 2′-position of the sugar, therefore, overall providing a —Oalkylenealkoxy substituent, such as an —OCH₂CH₂OCH₃ substituent, on a sugar moiety of an oligomeric compound as described herein. This will be well understood by a person skilled in the art and is generally referred to as an MOE substituent as defined herein and as known in the art.

[0127] As used herein, “amino” includes primary, secondary and tertiary amino groups.

[0128] As used herein, “halo” and “halogen,” mean an atom selected from fluorine, chlorine, bromine and iodine.

[0129] As used herein, the term “muRNA” or “multi RNA” may include nucleic acid constructs comprising more than one, typically two, RNA sequences, i.e., first and second nucleic acid portions, targeting one region of PCSK9 mRNA and an mRNA region of APOC3. The targeting RNA sequences are also referred to as “antisense” or “guide” strands, while the respective passenger strands, i.e., third and fourth nucleic acid portions being complementary to the first and second portion, respectively, are also included in the nucleic acid construct. In particular, such muRNA are designed such that subsequent to in vivo administration, they are disassembled and said first and second nucleic acid portions are released. A particular example for such muRNA is shown below, where (1) is the first nucleic acid portion, (2) is the third nucleic acid portion being complementary to (1), (3) is the second nucleic acid portion being complementary to the fourth nucleic acid portion, while (5) is a labile linker while (6) is a ligand, which will both be explained below.

[0130] Further miniaturization by shortening the sense regions leads to bulge in the central part of the molecule where the 3′-terminal regions of the two antisense regions face each other:

[0131] In the diagram above, “GN” designates a GalNAc moiety, and “SBS” designates the fragile site which may be implemented as a nucleoside with a non-modified sugar.

[0132] As used herein “PC1” and “PC1a” are two PCSK9 siRNA sequences that have the same siRNA sequences with different GalNAc conjugations. These compounds are known to be effective in PCSK9 gene knockdown and were used as positive control compounds in the Examples section.

[0133] It will also be understood that oligomeric compounds as described herein may have one or more non-hybridizing nucleosides at one or both ends of one or both strands (overhangs) and/or one or more internal non-hybridizing nucleosides (mismatches) provided there is sufficient complementarity to maintain hybridization under physiologically relevant conditions.

[0134] Alternatively, oligomeric compounds as described herein may be blunt ended at at least one end.

[0135] The term “comprising” is used herein to mean including the method steps or elements identified, but that such steps or elements do not comprise an exclusive list and as such there may be present additional steps or elements.

[0136] Further, to the extent that the term “includes” is used in either the detailed description or the claims, such term is intended to be inclusive in a manner similar to the term “comprising” as “comprising” is interpreted when employed as a transitional word in a claim.

[0137] The Following Embodiments are Provided (Items):

[0138] 1. A nucleic acid construct comprising at least:

[0139] (a) a first nucleic acid portion that is at least partially complementary to at least a first portion of an RNA which is transcribed from a PCSK9 gene;

[0140] (b) a second nucleic acid portion that is at least partially complementary to at least a second portion of an RNA which is transcribed from a APOC3 gene;

[0141] (c) a third nucleic acid portion that is at least partially complementary to said first nucleic acid portion of (a), so as to form a first nucleic acid duplex region therewith;

[0142] (d) a fourth nucleic acid portion that is at least partially complementary to said second nucleic acid portion of (b), so as to form a second nucleic acid duplex region therewith.

[0143] 2. The construct according to item 1, wherein said construct is designed such that subsequent to in vivo administration said construct disassembles to yield at least first and second discrete nucleic acid targeting molecules that respectively target said RNA portions transcribed from said target genes of (a) and (b);

[0144] whereby (i) said first nucleic acid targeting molecule modulates expression of said target gene of (a), and comprises, or is derived from, at least said first nucleic acid portion of (a), and (ii) said second nucleic acid targeting molecule modulates expression of said target gene of (b), and comprises, or is derived from, said second nucleic acid portion of (b).

[0145] 3. The construct according to item 1 or 2, wherein said construct is designed to disassemble such that said first and second discrete nucleic acid targeting molecules are respectively processed by independent RNAi-induced silencing complexes.

[0146] 4. The construct according to any one of items 1 to 3, which further comprises at least one labile functionality such that subsequent to in vivo administration said construct is cleaved so as to yield said at least first and second discrete nucleic acid targeting molecules.

[0147] 5. The construct according to item 4, wherein said labile functionality comprises one or more unmodified nucleotides.

[0148] 6. The construct according to item 5, wherein said one or more unmodified nucleotides of said labile functionality represent one or more cleavage positions within said construct whereby subsequent to in vivo administration said construct is cleaved at said one or more cleavage positions so as to yield said at least first and second discrete nucleic acid targeting molecules.

[0149] 7. The construct according to item 6, wherein said cleavage positions are respectively located within the construct so that subsequent to cleavage said first discrete nucleic acid targeting molecule comprises, or is derived from, said first nucleic acid duplex region, and said second discrete nucleic acid targeting molecule comprises, or is derived from, said second nucleic acid duplex region.

[0150] 8. The construct according to item 7, wherein said first discrete nucleic acid targeting molecule comprises or consists of said first nucleic acid portion of (a) and said third nucleic acid portion of (c), and/or said second discrete nucleic acid targeting molecule comprises or consists of said second nucleic acid portion of (b) and said fourth nucleic acid portion of (d).

[0151] 9. The construct according to any one of items 1 to 8, wherein

[0152] (a) said first nucleic acid portion has a nucleobase sequence selected from Table 1a (SEQ ID NOs: 1 to 7) or SEQ ID NO: 31;

[0153] (b) said second nucleic acid portion has a nucleobase sequence selected from Table 1b (SEQ ID NOs: 8 to 14) or SEQ ID NO: 29;

[0154] (c) said third nucleic acid portion has a nucleobase sequence selected from Table 2a (SEQ ID NOs: 15 to 21) or SEQ ID NO: 32; and/or

[0155] (d) said fourth nucleic acid portion has a nucleobase sequence selected from Table 2b (SEQ ID NOs: 22 to 28) or SEQ ID NO: 30.

[0156] 10. The construct according to any of items 1 to 9, wherein said first nucleic acid portion of

[0157] (a) is directly or indirectly linked to said fourth nucleic acid portion of (d) as a primary structure.

[0158] 11. The construct according to item 10, wherein said first and said fourth nucleic acid portions have the nucleobase sequences of SEQ ID NOs: 2 and 22; 4 and 24; 5 and 22; 6 and 24; 4 and 22; 6 and 22; 31 and 24; 31 and 22; 4 and 25; 5 and 26; 3 and 28; or 1 and 30, respectively.

[0159] 12. The construct according to any of items 1 to 11, wherein said second nucleic acid portion of (b) is directly or indirectly linked to said third nucleic acid portion of (c) as a primary structure.

[0160] 13. The construct according to item 11 or 12, wherein said second and third nucleic acid portions have the nucleobase sequences of SEQ ID NOs: 8 and 16; 10 and 18; 8 and 19; 10 and 20; 8 and 18; 8 and 20; 10 and 32; 8 and 32; 11 and 18; 12 and 19; 14 and 17; or 29 and 15, respectively.

[0161] 14. The construct according to any of items 1 to 9, 11 or 13, that further comprises 1 to 8 additional nucleic acid portions that are respectively at least partially complementary to an additional 1 to 8 portions of RNA transcribed from one or more target genes, which target genes may be the same or different to each other, and/or the same or different to the target genes defined in (a) and/or (b), and wherein each of the 1 to 8 additional nucleic acid portions respectively form additional duplex regions with respective passenger nucleic acid portions that are respectively at least partially complementary therewith.

[0162] 15. The construct according to item 14, wherein said second nucleic acid portion of (b), and said 1 to 8 additional nucleic acid portions, are directly or indirectly linked to selected passenger nucleic acid portions as respective primary structures.

[0163] 16. The construct according to any of items 10, 12 or 15, wherein said direct or indirect linking represents either (i) an internucleotide bond, (ii) an internucleotide nick, or (iii) a nucleic acid linker portion of 1, 2, 3, 4, 5, 6, 7, 8, 9, or 10 nucleotides, said nucleic acid linker optionally being single stranded.

[0164] 17. The construct according to item 16 (i), wherein said linking is direct, thereby giving rise to (a) contiguous strand(s).

[0165] 18. The construct of any one of items 1 to 17, especially of item 16 (i), wherein there exists some complementarity between the first nucleic acid portion of (a) and the second nucleic acid portion of (b), or the third nucleic acid portion of (c) and the fourth nucleic acid portion of (d).

[0166] 19. The construct according to item 18, wherein said complementarity

[0167] (i) is/are 1, 2, 3, 4, 5, 6, 7, 8, 9, or 10, optionally 2, 3, 4 or 5 base pairs; and/or

[0168] (ii) is between the first nucleic acid portion of (a) and the second nucleic acid portion of (b).

[0169] 20. The construct according to item 16 (i) to 19, as dependent on item 5, wherein said internucleotide bond involves at least one of said one or more unmodified nucleotides, wherein optionally cleavage occurs at the 3′ position of (at least one of) said unmodified nucleotide(s).

[0170] 21. The construct according to any of items 1 to 20, wherein said first nucleic acid portion of (a), and/or said second nucleic acid portion of (b), and/or said third nucleic acid portion of (c), and/or said fourth nucleic acid portion of (d), are respectively 7 to 25 nucleotides in length.

[0171] 22. The construct according to item 21, wherein said first nucleic acid portion of (a) and/or said second nucleic acid portion of (b) have a length of 18 to 21, more optionally 18 or 19, and yet more optionally 19 nucleotides.

[0172] 23. The construct according to item 21 or 22, wherein said third nucleic acid portion of (c), and/or said fourth nucleic acid portion of (d) have a length of 11 to 20, more optionally 13 to 16, and yet more optionally 14 or 15, most optionally 14 nucleotides.

[0173] 24. The construct according to any one of items 21 to 23, wherein said unmodified nucleotide(s) is/are at any of position 18 to 25, more optionally at any of positions 18 to 21, and most optionally at position 19 and/or the 3′ terminal position of said first nucleic acid portion of (a) and/or of said third nucleic acid portion of (c).

[0174] 26. The construct according to any of items 17 to 19 or 21 to 23 as dependent on item 16(iii), wherein said nucleic acid linker portion is 1 to 8 nucleotides in length, optionally 2 to 7 or 3 to 6 nucleotides in length, more optionally about 4 or 5 and most optionally 4 nucleotides in length.

[0175] 27. The construct according to any one of items 21 to 26, wherein one, more of all of the duplex regions independently have a length of 11 to 19, more optionally 14 to 19, and yet more optionally 14 or 15 base pairs, most optionally 14 base pairs, wherein optionally there is one mismatch within said duplex region.

[0176] 28. The construct according to any of items 1 to 27, which further comprises one or more ligands.

[0177] 29. The construct according to any one of items 1 to 28, wherein said first nucleic acid portion of (a), and/or said second nucleic acid portion of (b), and/or said third nucleic acid portion of (c), and/or said fourth nucleic acid portion of (d), and/or, to the extent present, said 1 to 8 additional nucleic acid portions as defined in items 14 and 15, and/or said passenger nucleic acid portions as defined in items 14 or 15, respectively have a 5′ to 3′ directionality thereby defining 5′ and 3′ regions thereof.

[0178] 30. The construct according to any one of items 28 or 29, wherein one or more ligands are conjugated at the 3′ region, optionally the 3′ end, of any of (i) said third nucleic acid portion of (c), and/or (ii) said fourth nucleic acid portion of (d), and/or, to the extent present, said (iii) passenger nucleic acid portions as defined in items 14 or 15.

[0179] 31. The construct according to any one of items 28 to 30, wherein one or more ligands are conjugated at one or more regions intermediate of the 5′ and 3′ regions of any of said nucleic acid portions, optionally of said third nucleic acid portion of (c), and/or said fourth nucleic acid portion of (d), and/or said passenger nucleic acid portions as defined in items 14 or 15.

[0180] 32. The construct of any one of items 28 to 31, wherein one or more ligands are conjugated at the 5′ region, optionally the 5′ end, of any of said nucleic acid portions.

[0181] 33. The construct according to any of items 28 to 32, wherein said one or more ligands are any cell directing moiety, such as lipids, carbohydrates, aptamers, vitamins and/or peptides that bind cellular membrane or a specific target on cellular surface.

[0182] 34. The construct according to item 33, wherein said one or more carbohydrates can be a monosaccharide, disaccharide, trisaccharide, tetrasaccharide, oligosaccharide or polysaccharide.

[0183] 35. The construct according to item 34, wherein said one or more carbohydrates comprise one or more hexose moieties.

[0184] 36. The construct of item 35, wherein said one or more hexose moieties are one or more galactose moieties, one or more lactose moieties, one or more N-Acetyl-Galactosamine moieties, and/or one or more mannose moieties.

[0185] 37. The construct according to item 36, which comprises two or three N-Acetyl-Galactosamine moieties.

[0186] 38. The construct according to any of items 28 to 37, wherein said one or more ligands are attached in a linear configuration, or in a branched configuration.

[0187] 39. The construct according to item 38, wherein said one or more ligands are attached as a biantennary or triantennary configuration, or as a configuration based on single ligands at different positions.

[0188] 40. The construct according to item 37 or 38, wherein said ligand has the following structure:

[chemical structure]

[0189] 41. The construct according to any of items 1 to 40, which further comprises one or more phosphorothioate or phosphorodithioate internucleotide linkages.

[0190] 42. The construct according item 41, which comprises 1 to 15 phosphorothioate or phosphorodithioate internucleotide linkages.

[0191] 43. The construct according to item 41 or 42, which comprises one or more phosphorothioate or phosphorodithioate internucleotide linkages at one or more of the 5′ and/or 3′ regions of said first nucleic acid portion of (a), and/or said second nucleic acid portion of (b), and/or said third nucleic acid portion of (c), and/or said fourth nucleic acid portion of (d), and/or said 1 to 8 additional nucleic acid portions as defined in items 14 or 15, and/or said passenger nucleic acid portions as defined in items 14 or 15.

[0192] 44. The construct according to any of items 41 to 43, which comprises phosphorothioate or phosphorodithioate internucleotide linkages between at least two adjacent nucleotides of the nucleic acid linker portion as defined in item 16 (iii).

[0193] 45. The construct according to any of item 44, which comprises a phosphorothioate or phosphorodithioate internucleotide linkage between each adjacent nucleotide that is present in said nucleic acid linker portion.

[0194] 46. The construct according to any of items 41 to 45, which comprises a phosphorothioate or phosphorodithioate internucleotide linkage linking:

[0195] the first nucleic acid portion of (a) to the nucleic acid linker portion as defined in items 16 (iii); and/or the second nucleic acid portion of (b) to the nucleic acid linker portion as defined in items 16 (iii); and/or the third nucleic acid portion of (c) to the nucleic acid linker portion as defined in items 16 (iii) and/or the fourth nucleic acid portion of (d) to the nucleic acid linker portion as defined in items 16 (iii); and/or the 1 to 8 additional nucleic acid portions as defined in items 14 or 15 to the nucleic acid linker portion as defined in items 16 (iii); and/or the passenger nucleic acid portions as defined in items 14 or 15 to the nucleic acid linker portion as defined in items 16 (iii).

[0196] 47. The construct according to any of items 1 to 46, wherein at least one nucleotide of at least one of the following is modified:

[0197] the first nucleic acid portion of (a); and/or the second nucleic acid portion of (b); and/or the third nucleic acid portion of (c); and/or the fourth nucleic acid portion of (d); and/or to the extent present, the 1 to 8 additional nucleic acid portions as defined in items 14 or 15; and/or to the extent present, the passenger nucleic acid portions as defined in items 14 or 15; and/or to the extent present, the nucleic acid linker portion as defined in items 16 (iii).

[0198] 48. The construct according to item 47, wherein one or more of the odd numbered nucleotides starting from the 5′ region of one of the following are modified, and/or wherein one or more of the even numbered nucleotides starting from the 5′ region of one of the following are modified, wherein typically the modification of the even numbered nucleotides is a second modification that is different from the modification of odd numbered nucleotides: the first nucleic acid portion of (a); and/or the second nucleic acid portion of (b); and/or the third nucleic acid portion of (c); and/or the fourth nucleic acid portion of (d); and/or to the extent present, the 1 to 8 additional nucleic acid portions as defined in items 14 or 15; and/or to the extent present, the passenger nucleic acid portions as defined in items 14 or 15.

[0199] 49. The construct according to item 47 or 48, wherein one or more of the odd numbered nucleotides starting from the 3′ region of the third nucleic acid portion of (c) are modified by a modification that is different from the modification of odd numbered nucleotides starting from the 5′ region of the first nucleic acid portion of (a); and/or wherein one or more of the odd numbered nucleotides starting from the 3′ region of the fourth nucleic acid portion of (d) are modified by a modification that is different from the modification of odd numbered nucleotides starting from the 5′ region of the second nucleic acid portion of (b); and/or wherein one or more of the odd numbered nucleotides starting from the 3′ region of the passenger nucleic acid portions as defined in items 14 or 15, to the extent present, are modified by a modification that is different from the modification of odd numbered nucleotides starting from the 5′ region of the 1 to 8 additional nucleic acid portions as defined in items 14 or 15; and/or wherein one or more of the nucleotides of a nucleic acid linker portion as defined in items 16 (iii), to the extent present, are modified by a modification that (i) is different from the modification of an adjacent nucleotide of the 3′ region of the first nucleic acid portion of (a); and/or (ii) is different from the modification of an adjacent nucleotide of the 3′ region of the second nucleic acid portion of (b); and/or is different from the modification of an adjacent nucleotide of the 3′ region of the 1 to 8 additional nucleic acid portions, to the extent present, as defined in items 14 or 15.

[0200] 50. The construct according to any of items 47 to 49, wherein one or more of the even numbered nucleotides starting from the 3′ region of: (i) the third nucleic acid portion of (c), and/or (ii) the fourth nucleic acid portion of (d), and/or (iii) said passenger nucleic acid portions as defined in items 14 or 15, to the extent present, are modified by a modification that is different from the modification of odd numbered nucleotides starting from the 3′ region of these respective portions.

[0201] 51. The construct according to any of items 47 to 50, wherein at least one or more of the modified even numbered nucleotides of (i) the first nucleic acid portion of (a), and/or (ii) the second nucleic acid portion of (b), and/or (iii), to the extent present, the 1 to 8 additional nucleic acid portions as defined in items 14 or 15, is adjacent to at least one or more differently modified odd numbered nucleotides of these respective portions.

[0202] 52. The construct according to any of items 47 to 51, wherein at least one or more of the modified even numbered nucleotides of (i) the third nucleic acid portion of (c), and/or (ii) the fourth nucleic acid portion of (d), and/or (iii), to the extent present, the passenger nucleic acid portions as defined in items 14 or 15, is adjacent to at least one or more differently modified odd numbered nucleotides of these respective portions.

[0203] 53. The construct according to any of items 47 to 52, wherein a plurality of adjacent nucleotides of (i) the first nucleic acid portion of (a), and/or (ii) the second nucleic acid portion of (b), and/or (iii), to the extent present, the 1 to 8 additional nucleic acid portions as defined in claim 14 or 15, are modified by a common modification.

[0204] 54. The construct according to any of items 47 to 53, wherein a plurality of adjacent nucleotides of (i) the third nucleic acid portion of (c), and/or (ii) the fourth nucleic acid portion of (d), and/or (iii), to the extent present, the passenger nucleic acid portions as defined in claim 14 or 15, are modified by a common modification.

[0205] 55. The construct according to item 53 or 54, wherein said plurality of adjacent commonly modified nucleotides are 2 to 4 adjacent nucleotides, optionally 3 or 4 adjacent nucleotides.

[0206] 56. The construct according to item 55, wherein said plurality of adjacent commonly modified nucleotides are located in the 5′ region of (i) the third nucleic acid portion of (c), and/or (ii) the fourth nucleic acid portion of (d), and/or (iii), to the extent present, the passenger nucleic acid portions as defined in items 14 or 15.

[0207] 57. The construct according to any one of items 53 to 56, wherein a plurality of adjacent commonly modified nucleotides are located in the nucleic acid linker portion as defined in item 16 (iii).

[0208] 58. The construct according to any of items 47 to 57, wherein the one or more of the modified nucleotides of first nucleic acid portion of (a) do not have a common modification present in the corresponding nucleotide of the third nucleic acid portion of (c) of the first duplex region; and/or one or more of the modified nucleotides of second nucleic acid portion of (b) do not have a common modification present in the corresponding nucleotide of the fourth nucleic acid portion of (d) of the second duplex region; and/or one or more of the modified nucleotides of the 1 to 8 additional nucleic acid portions, to the extent present, as defined in item 14 or 15, do not have a common modification present in the corresponding nucleotide of the corresponding passenger nucleic acid portions of the respective duplex regions.

[0209] 59. The construct according to any of items 47 to 58, wherein the one or more of the modified nucleotides of the first nucleic acid portion of (a) are shifted by at least one nucleotide relative to a commonly modified nucleotide of the third nucleic acid portion of (c); and/or one or more of the modified nucleotides of the second nucleic acid portion of (b) are shifted by at least one nucleotide relative to a commonly modified nucleotide of the fourth nucleic acid portion of (d); and/or one or more of the modified nucleotides of the 1 to 8 additional nucleic acid portions, to the extent present, as defined in item 14 or 15 are shifted by at least one nucleotide relative to a commonly modified nucleotide of the passenger nucleic acid portions, to the extent present, as defined in item 14 or 15.

[0210] 60. The construct according to any of items 47 to 59, wherein the modification and/or modifications are each and individually sugar, phosphate, or base modifications.

[0211] 61. The construct according to item 60, where the modification is selected from nucleotides with 2′ modified sugars; conformationally restricted nucleotides (CRN) sugar such as locked nucleic acid (LNA), (S)-constrained ethyl bicyclic nucleic acid, and constrained ethyl (cEt), tricyclo-DNA; morpholino, unlocked nucleic acid (UNA), glycol nucleic acid (GNA), D-hexitol nucleic acid (HNA), and cyclohexene nucleic acid (CeNA).

[0212] 62. The construct according to item 61, wherein said 2′ modified sugar is selected from 2′-O-alkyl modified sugar, 2′-O-methyl modified sugar, 2′-O-methoxyethyl modified sugar, 2′-O-allyl modified sugar, 2′-C-allyl modified sugar, 2′-deoxy modified sugar such as 2′-deoxy ribose, 2′-F modified sugar, 2′-arabino-fluoro modified sugar, 2′-O-benzyl modified sugar, 2′-amino modified sugar, and 2′-O-methyl-4-pyridine modified sugar.

[0213] 63. The construct according to any of items 60 to 62, wherein the base modification is any one of an abasic nucleotide and a non-natural base comprising nucleotide.

[0214] 64. The construct according to any of items 47 to 63, wherein at least one modification is a 2′-O-methyl modification in a ribose moiety.

[0215] 65. The construct according to any of items 47 to 64, wherein at least one modification is a 2′-F modification in a ribose moiety.

[0216] 66. The construct according to any of items 47 to 65 wherein the nucleotides at any of positions 2 and 14 downstream from the first nucleotide of the 5′ region of (i) the first nucleic acid portion of (a); and/or (ii) the second nucleic acid portion of (b); and/or (iii), to the extent present, the 1 to 8 additional nucleic acid portions as defined in item 14 or 15; do not contain 2′-O-methyl modifications in ribose moieties.

[0217] 67. The construct according to any of items 47 to 66, wherein one, two or all three nucleotides of (i) the third nucleic acid portion of (c); and/or (ii) the fourth nucleic acid portion of (d); and/or (iii), to the extent present, said passenger nucleic acid portions as defined in item 14 or 15; that respectively correspond in position to any of the nucleotides at any of positions 11 to 13 downstream from the first nucleotide of the 5′ region of (i) the first nucleic acid portion of (a); and/or (ii) the second nucleic acid portion of (b); and/or (iii) the 1 to 8 additional nucleic acid portions, to the extent present, as defined in item 14 or 15; do not contain 2′-O-methyl modifications in ribose moieties.

[0218] 68. The construct according to item 66 or 67, wherein the nucleotides at any of positions 2 and 14 downstream from the first of (i) the first nucleic acid portion of (a); and/or (ii) the second nucleic acid portion of (b); and/or (iii), to the extent present, the 1 to 8 additional nucleic acid portions as defined in item 14 or 15; contain 2′-F modifications in ribose moieties.

[0219] 69. The construct according to any of items 66 to 68, wherein one, two or all three nucleotides of (i) the third nucleic acid portion of (c); and or (ii) the fourth nucleic acid portion of (d); and/or (iii), to the extent present, said passenger nucleic acid portions as defined in items 14 or 15; that respectively correspond in position to any of the nucleotides at any of positions 11 to 13 downstream from the first nucleotide of the 5′ region of (i) the first nucleic acid portion of (a); and/or (ii) the second nucleic acid portion of (b); and/or (iii), to the extent present, the 1 to 8 additional nucleic acid portions as defined in item 14 or 15; contain 2′-F modifications in ribose moieties.

[0220] 70. The construct according to any one of items 65 to 69, wherein all remaining nucleotides contain either 2′-O-methyl modifications or 2′-F modifications in ribose moieties, optionally with the exception of the unmodified nucleotide(s) in accordance with item 5.

[0221] 71. The construct according to item 70, wherein said remaining nucleotides contain 2′-O-methyl modifications in ribose moieties.

[0222] 72. The construct according to item 70 or 71, wherein said one or more, optionally one, unmodified nucleotide represents any of the nucleotides of the nucleic acid linker portion as defined in item 16 (iii), optionally the nucleotide of the nucleic acid linker portion as defined in item 16 (iii) that is adjacent to (i) the third nucleic acid portion of (c); and or (ii) the fourth nucleic acid portion of (d); and/or (iii), to the extent present, said passenger nucleic acid portions as defined in item 14 or 15.

[0223] 73. The construct of any one of the preceding items, wherein

[0224] (a) said first nucleic acid portion is selected from Table 3a;

[0225] (b) said second nucleic acid portion is selected from Table 3b;

[0226] (c) said third nucleic acid portion is selected from Table 4a; and/or

[0227] (d) said fourth nucleic acid portion is selected from Table 4b.

[0228] 74. The construct of any one of the preceding items wherein said construct comprises two strands, wherein the first strand is selected from Table 5a, such as table entry number 50, and the second strand from Table 5b, such as table entry number 50; or said first and second strands are selected from Table 7a, such as entries 1 (first strand) and 2 (second strand) or entries 3 (first strand) and 4 (second strand), respectively; or said first and second strands are selected from Table 7b, such as entries 11 (first strand) and 12 (second strand), or entries 13 (first strand) and 14 (second strand), or entries 19 (first strand) and 20 (second strand), respectively.

[0229] 75. The construct of item 74, wherein first and second strands are selected from entries 2, 18, 5, 20, 50 to 54, 25, 33, and 45 of Tables 5a and 5b, respectively.

[0230] 76. The construct according to any one of items 73 to 75, wherein the 3′ terminal positions of said first and said third nucleic acid portions are replaced with an unmodified nucleotide.

[0231] 77. The construct according to any of items 1 to 76, which comprises at least one vinylphosphonate modification, such as at least one vinylphosphonate modification in the 5′ region of (i) the first nucleic acid portion of (a); and/or (ii) the second nucleic acid portion of (b); and/or (iii), to the extent present, the 1 to 8 additional nucleic acid portions as defined in item 14 o 15.

[0232] 78. The construct according to any of items 1 to 77, wherein one or more nucleotides of the first nucleic acid portion of (a); and/or the second nucleic acid portion of (b); and/or the third nucleic acid portion of (c); and/or the fourth nucleic acid portion of (d); and/or to the extent present, the 1 to 8 additional nucleic acid portions as defined in item 14 or 15; and/or to the extent present, the passenger nucleic acid portions as defined in item 14 or 15; is an inverted nucleotide and is attached to the adjacent nucleotide via the 3′ carbon of the nucleotide and the 3′ carbon of the adjacent nucleotide, and/or is an inverted nucleotide and is attached to the adjacent nucleotide via the 5′ carbon of the nucleotide and the 5′ carbon of the adjacent nucleotide.

[0233] 79. The construct according to item 78, wherein the inverted nucleotide is attached to the adjacent nucleotide via a phosphate group by way of a phosphodiester linkage; or is attached to the adjacent nucleotide via a phosphorothioate group; or is attached to the adjacent nucleotide via a phosphorodithioate group.

[0234] 80. The construct according to any of items 1 to 79, which is blunt ended.

[0235] 81. The construct according to any of items 1 to 79, wherein the first nucleic acid portion of (a); and/or the second nucleic acid portion of (b); and/or the third nucleic acid portion of (c); and/or the fourth nucleic acid portion of (d); and/or to the extent present, the 1 to 8 additional nucleic acid portions as defined in item 14 or 15; and/or to the extent present, the passenger nucleic acid portions as defined in item 14 or 15; has an overhang.

[0236] 82. The construct according to any of items 1 to 81, wherein the target RNA is an mRNA or an other RNA molecule.

[0237] 83. A composition comprising a construct according to any of items 1 to 82, and a physiologically acceptable excipient.

[0238] 84. A pharmaceutical composition comprising a construct according to any of items 1 to 82.

[0239] 85. The pharmaceutical composition of item 84, further comprising a pharmaceutically acceptable excipient, diluent, antioxidant, and/or preservative.

[0240] 86. The pharmaceutical composition of item 84 or 85, wherein said construct is the only pharmaceutically active agent.

[0241] 87. The pharmaceutical composition of item 86, wherein said pharmaceutical composition is to be administered to patients or individuals which are statin-intolerant and/or for whom statins are contraindicated.

[0242] 88. The pharmaceutical composition of item 84 or 85, wherein said pharmaceutical composition furthermore comprises one or more further pharmaceutically active agents.

[0243] 89. The pharmaceutical composition of item 88, wherein said further pharmaceutically active agent(s) is/are an RNAi agent which is directed to a target different from PCSK9 and from APOC3 and/or a lipid-lowering agent distinct from said construct, wherein said lipid-lowering agent is optionally ezetimib; Vascepa; Vupanorsen; statins such as Rosuvastatin and Simvastatin; and/or fibrates such fenofibrate.

[0244] 90. The pharmaceutical composition of item 88 or 89, wherein said construct and said further pharmaceutically active agent(s) are to be administered concomitantly or in any order.

[0245] 91. A construct according to any of items 1 to 82, for use in human or veterinary medicine or therapy.

[0246] 92. A construct according to any of items 1 to 82, for use in a method of treating, ameliorating and/or preventing a disease or disorder.

[0247] 93. The construct for use of item 92, wherein said disease or disorder is a PCSK9- and/or an APOC3-associated disease or disorder or a disease or disorder requiring reduction of PCSK9 and/or APOC3 expression levels.

[0248] 94. The compound for use of item 92 or 93, wherein said disease or disorder is

[0249] (a) a PCSK9-associated disease or disorder, or a disease or disorder requiring reduction of low-density lipoprotein (LDL) cholesterol, said disease or disorder optionally being selected from dyslipidemia including mixed dyslipidemia, hypercholesterolemia, heterozygous familial hypercholesterolemia, non-familial hypercholesterolemia; atherosclerosis; and atherosclerotic cardiovascular disease (ASCVD) including myocardial infarction, stroke and peripheral arterial disease; and/or

[0250] (b) an APOC3-associated disease or disorder, or a disease or disorder requiring reduction of APOC3 expression levels, said disease or disorder optionally being selected from dyslipidemia including mixed dyslipidemia; hyperchylomicronemia including familial hyperchylomicronemia; hypertriglyceridemia, optionally severe hypertriglyceridemia and/or hypertriglyceridemia with blood triglyceride levels above 500 mg/dl; inflammation including low-grade inflammation; atherosclerosis; atherosclerotic cardiovascular diseases (ASCVD) including major adverse cardiovascular events (MACE) such as myocardial infarction, stroke and peripheral arterial disease; and pancreatitis including acute pancreatitis.

[0251] 95. A method of treating a disease or disorder comprising administration of a construct according to any of items 1 to 82, to an individual in need of treatment.

[0252] 96. The method according to item 95, wherein the construct is administered subcutaneously or intravenously to the individual, optionally subcutaneously.

[0253] 97. The method according to item 95 or 96, wherein subsequent to in vivo administration the construct disassembles to yield at least first and second discrete nucleic acid targeting molecules that target portions of RNA transcribed from a PCSK9 and an APOC3 gene, respectively.

[0254] 98. A process of making a construct according to any of items 1 to 82.

[0255] 99. A process according to item 98, which comprises:

[0256] (i) synthesizing each of:

[0257] (a) a first nucleic acid portion that is at least partially complementary to at least a first portion of RNA transcribed from a target gene;

[0258] (b) a second nucleic acid portion that is at least partially complementary to at least a second portion of RNA transcribed from a target gene, which target gene may be the same or different to the target gene defined in (a);

[0259] (c) a third nucleic acid portion that is at least partially complementary to said first nucleic acid portion of (a);

[0260] (d) a fourth nucleic acid portion that is at least partially complementary to said second nucleic acid portion of (b);

[0261] (ii) contacting at least said first and second nucleic acid portions of (a) and (b) in vitro, so as to form a first nucleic acid duplex region comprising said first and second nucleic acid portions of (a) and (b);

[0262] (iii) contacting at least said third and fourth nucleic acid portions of (c) and (d) in vitro, so as to form a second nucleic acid duplex region comprising said third and fourth nucleic acid portions of (c) and (d);

[0263] (iv) forming a nucleic acid construct in vitro comprising at least said first and second nucleic acid duplex regions.

[0264] 100. A process according to item 99, which further comprises generating from said construct at least first and second nucleic acid targeting molecules, wherein the first nucleic acid targeting molecule modulates expression of the target gene of (a), and comprises, or is derived from, at least the first nucleic acid portion of (a), and wherein the second nucleic acid targeting molecule modulates expression of said target gene of (b), and comprises, or is derived from, the second nucleic acid portion of (b).

[0265] 101. A process according to item 100, wherein said at least first and second nucleic acid targeting molecules are generated subsequent to in vivo administration.

[0266] 102. A process according to item 101, wherein labile functionality present in said construct is cleaved subsequent to in vivo administration so as to generate said at least first and second discrete nucleic acid targeting molecules.

[0267] 103. A process according to item 102, wherein said labile functionality comprises one or more unmodified nucleotides.

[0268] 104. A process according to item 103, wherein said one or more unmodified nucleotides of said labile functionality represent one or more cleavage positions within said construct whereby subsequent to in vivo administration said construct is cleaved at said one or more cleavage positions so as to yield said at least first and second discrete nucleic acid targeting molecules.

[0269] 105. A process according to item 104, wherein said cleavage positions are respectively located within the construct so that subsequent to cleavage said first discrete nucleic acid targeting molecule comprises, or is derived from, said first nucleic acid duplex region, and said second discrete nucleic acid targeting molecule comprises, or is derived from, said second nucleic acid duplex region.

[0270] The following Tables show nucleobase sequences and full definitions (including sugar modifications and, where applicable, phosphate modifications) of portions as well as of entire constructs as described herein.

[0271] The notation used is common in the art and as the following meaning:

[0272] A represents adenine;

[0273] U represents uracil;

[0274] C represents cytosine;

[0275] G represents guanine.

[0276] P represents a terminal phosphate group which may or may not be present;

[0277] m represents a methyl modification at the 2′ position of the sugar of the underlying nucleoside, wherein an accordingly modified nucleotide such as mG is sometimes displayed in brackets ([mG]);

[0278] f represents a fluoro modification at the 2′ position of the sugar of the underlying nucleoside, wherein an accordingly modified nucleotide such as fG is sometimes displayed in brackets ([fG]);

[0279] r indicates an unmodified (2′-OH) ribonucleotide, wherein corresponding nucleotide such as rG is sometimes displayed in brackets ([rG]);

[0280] (ps), #, [#], or * represents a phosphorothioate inter-nucleoside linkage;

[0281] i represents an inverted inter-nucleoside linkage, which can be either 3′-3′, or 5′-5′;

[0282] vp represents vinyl phosphonate;

[0283] mvp represents methyl vinyl phosphonate;

[0284] 3×GalNAc represents an optionally present trivalent GalNAc; and

[0285] Mono-GalNAc-PA, represents an optional one of optionally three GalNAc bearing moieties, the assembly of three Mono-GalNAc-PA moieties also being referred to as “toothbrush”, where the individual moieties are connected by phosphoramidates (“PA”); see the embodiments for an illustration.

[0286] Table 1a below shows the nucleobase sequences of PCSK9-targeting antisense portions (first nucleic acid portions). The sequences are those of SEQ ID NOs: 1 to 7 (same order).

| Sequence | Anti-Sense Sequence |
|---|---|
| ID | (5′ to 3′) |
| PCS44 | UCUUCAAGUUACAAAAGCA |
| PCS46 | UAAAAGCAAAACAGGUCUA |
| PCS53 | UACAAAAGCAAAACAGGUC |
| PCS29 | UGCAAAACAGGUCUAGAAA |
| PCS57 | UCAAAAGCAAAACAGGUCU |
| PCS52 | UAGAAUAAAUAUCUUCAAG |
| PCS55 | UAAAGCAAAACAGGUCUAG |

[0287] Table 1b below shows the nucleobase sequences of APOC3-targeting antisense portions (second nucleic acid portions). The sequences are those of SEQ ID NOs: 8 to 14 (same order). The nucleobase sequence of a further APOC3-targeting antisense portion of the molecules is set forth in SEQ ID NO: 29.

| Sequence | Anti-Sense Sequence |
|---|---|
| ID | (5′ to 3′) |
| AP277 | UUGGAUAGGCAGGUGGACU |
| AP337 | UGCACUGAGAAUACUGUCC |
| AP028 | UCAACAAGGAGUACCCGGG |
| AP369 | UCUUGUCCAGCUUUAUUGG |
| AP366 | UUCCAGCUUUAUUGGGAGG |
| AP367 | UGUCCAGCUUUAUUGGGAG |
| AP336 | UCACUGAGAAUACUGUCCC |

[0288] Table 2a below shows the nucleobase sequences of PCSK9-targeting sense portions (third nucleic acid portions). The sequences are those of SEQ ID NOs:15 to 21 (same order).

| Sequence | |
|---|---|
| ID | SS Sequence (5′ to 3′) |
| PCS44 | UUUGUAACUUGAAGA |
| PCS46 | CCUGUUUUGCUUUUA |
| PCS53 | UGUUUUGCUUUUGUA |
| PCS29 | UAGACCUGUUUUGCA |
| PCS57 | CUGUUUUGCUUUUGA |
| PCS52 | AAGAUAUUUAUUCUA |
| PCS55 | ACCUGUUUUGCUUUA |

[0289] Table 2b below shows the nucleobase sequences of APOC3-targeting sense portions (fourth nucleic acid portions). The sequences are those of SEQ ID NOs: 22 to 28 (same order). The nucleobase sequence of a further APOC3-targeting sense portion of the molecule is set forth in SEQ ID NO: 30.

| Sequence | |
|---|---|
| ID | SS Sequence (5′ to 3′) |
| AP277 | CACCUGCCUAUCCAA |
| AP337 | AGUAUUCUCAGUGCA |
| AP028 | GGUACUCCUUGUUGA |
| AP369 | UAAAGCUGGACAAGA |
| AP366 | CCAAUAAAGCUGGAA |
| AP367 | CAAUAAAGCUGGACA |
| AP336 | CAGUAUUCUCAGUGA |

[0290] Table 3a shows PCSK9-targeting antisense portions including sugar modification information.

| SEQ ID NO: | AS Modified |
|---|---|
| 33 | PmU.fC.mU.fU.mC.fA.mA.fG.mU.fU.mA.fC.mA.fA.mA.fA.mG.fC.mA |
| 34 | PmU.fA.mA.fA.mA.fG.mC.fA.mA.fA.mA.fC.mA.fG.mG.fU.mC.fU.mA |
| 35 | PmU.fA.mC.fA.mA.fA.mA.fG.mC.fA.mA.fA.mA.fC.mA.fG.mG.fU.mC |
| 36 | PmU.fG.mC.fA.mA.fA.mA.fC.mA.fG.mG.fU.mC.fU.mA.fG.mA.fA.mA |
| 37 | PmU.fC.mA.fA.mA.fA.mG.fC.mA.fA.mA.fA.mC.fA.mG.fG.mU.fC.mU |
| 38 | PmU.fA.mG.fA.mA.fU.mA.fA.mA.fU.mA.fU.mC.fU.mU.fC.mA.fA.mG |
| 39 | PmU.fA.mA.fA.mG.fC.mA.fA.mA.fA.mC.fA.mG.fG.mU.fC.mU.fA.mG |

[0291] Table 3b shows APOC3-targeting antisense portions including sugar modification information.

| SEQ ID NO: | AS Modified |
|---|---|
| 40 | PmU.fU.mG.fG.mA.fU.mA.fG.mG.fC.mA.fG.mG.fU.mG.fG.mA.fC.mU |
| 41 | PmU.fG.mC.fA.mC.fU.mG.fA.mG.fA.mA.fU.mA.fC.mU.fG.mU.fC.mC |
| 42 | PmU.fC.mA.fA.mC.fA.mA.fG.mG.fA.mG.fU.mA.fC.mC.fC.mG.fG.mG |
| 43 | PmU.fC.mU.fU.mG.fU.mC.fC.mA.fG.mC.fU.mU.fU.mA.fU.mU.fG.mG |
| 44 | PmU.fU.mC.fC.mA.fG.mC.fU.mU.fU.mA.fU.mU.fG.mG.fG.mA.fG.mG |
| 45 | PmU.fG.mU.fC.mC.fA.mG.fC.mU.fU.mU.fA.mU.fU.mG.fG.mG.fA.mG |
| 46 | PmU.fC.mA.fC.mU.fG.mA.fG.mA.fA.mU.fA.mC.fU.mG.fU.mC.fC.mC |

[0292] Table 4a shows PCSK9-targeting sense portions including sugar modification information.

| SEQ ID | |
|---|---|
| NO: | S Modified |
| 47 | fU.mU.fU.mG.fU.mA.fA.mC.fU.mU.fG.mA.fA.mG.fA |
| 48 | fC.mC.fU.mG.fU.mU.fU.mU.fG.mC.fU.mU.fU.mU.fA |
| 49 | fU.mG.fU.mU.fU.mU.fG.mC.fU.mU.fU.mU.fG.mU.fA |
| 50 | fU.mA.fG.mA.fC.mC.fU.mG.fU.mU.fU.mU.fG.mC.fA |
| 51 | fC.mU.fG.mU.fU.mU.fU.mG.fC.mU.fU.mU.fU.mG.fA |
| 52 | fA.mA.fG.mA.fU.mA.fU.mU.fU.mA.fU.mU.fC.mU.fA |
| 53 | fA.mC.fC.mU.fG.mU.fU.mU.fU.mG.fC.mU.fU.mU.fA |

[0293] Table 4b shows APOC3-targeting sense portions including sugar modification information.

| SEQ ID | |
|---|---|
| NO: | S Modified |
| 54 | fC.mA.fC.mC.fU.mG.fC.mC.fU.mA.fU.mC.fC.mA.fA |
| 55 | fA.mG.fU.mA.fU.mU.fC.mU.fC.mA.fG.mU.fG.mC.fA |
| 56 | fG.mG.fU.mA.fC.mU.fC.mC.fU.mU.fG.mU.fU.mG.fA |
| 57 | fU.mA.fA.mA.fG.mC.fU.mG.fG.mA.fC.mA.fA.mG.fA |
| 58 | fC.mC.fA.mA.fU.mA.fA.mA.fG.mC.fU.mG.fG.mA.fA |
| 59 | fC.mA.fA.mU.fA.mA.fA.mG.fC.mU.fG.mG.fA.mC.fA |
| 60 | fC.mA.fG.mU.fA.mU.fU.mC.fU.mC.fA.mG.fU.mG.fA |

[0294] Table 5a shows linked first and fourth nucleic acid portions of the molecules. Linking is direct to give rise to a single contiguous strand.

| | | | |
|---|---|---|---|
| SEQ ID | 1 | AP277AS/PCS44 | PmU.fC.mU.fU.mC.fA.mA.fG.mU.fU.mA.fC.mA.fA.mA.fA. |
| NO: 61 | | | mG.fC.mA.fC.mA.fC.mC.fU.mG.fC.mC.fU.mA.fU.mC.fC. |
| | | | mA.fA |
| SEQ ID | 2 | AP277AS/PCS46 | PmU.fA.mA.fA.mA.fG.mC.fA.mA.fA.mA.fC.mA.fG.mG.fU. |
| NO: 62 | | | mC.fU.mA.fC.mA.fC.mC.fU.mG.fC.mC.fU.mA.fU.mC.fC. |
| | | | mA.fA |
| SEQ ID | 3 | AP277AS/PCS53 | PmU.fA.mC.fA.mA.fA.mA.fG.mC.fA.mA.fA.mA.fC.mA.fG. |
| NO: 63 | | | mG.fU.mC.fC.mA.fC.mC.fU.mG.fC.mC.fU.mA.fU.mC.fC. |
| | | | mA.fA |
| SEQ ID | 4 | AP277AS/PCS29 | PmU.fG.mC.fA.mA.fA.mA.fC.mA.fG.mG.fU.mC.fU.mA.fG. |
| NO: 64 | | | mA.fA.mA.fC.mA.fC.mC.fU.mG.fC.mC.fU.mA.fU.mC.fC. |
| | | | mA.fA |
| SEQ ID | 5 | AP277AS/PCS57 | PmU.fC.mA.fA.mA.fA.mG.fC.mA.fA.mA.fA.mC.fA.mG.fG. |
| NO: 65 | | | mU.fC.mU.fC.mA.fC.mC.fU.mG.fC.mC.fU.mA.fU.mC.fC. |
| | | | mA.fA |
| SEQ ID | 6 | AP277AS/PCS52 | PmU.fA.mG.fA.mA.fU.mA.fA.mA.fU.mA.fU.mC.fU.mU.fC. |
| NO: 66 | | | mA.fA.mG.fC.mA.fC.mC.fU.mG.fC.mC.fU.mA.fU.mC.fC. |
| | | | mA.fA |
| SEQ ID | 7 | AP277AS/PCS55 | PmU.fA.mA.fA.mG.fC.mA.fA.mA.fA.mC.fA.mG.fG.mU.fC. |
| NO: 67 | | | mU.fA.mG.fC.mA.fC.mC.fU.mG.fC.mC.fU.mA.fU.mC.fC. |
| | | | mA.fA |
| SEQ ID | 8 | AP377As/PCS44 | PmU.fC.mU.fU.mC.fA.mA.fG.mU.fU.mA.fC.mA.fA.mA.fA. |
| NO: 68 | | | mG.fC.mA.fA.mG.fU.mA.fU.mU.fC.mU.fC.mA.fG.mU.fG. |
| | | | mC.fA |
| SEQ ID | 9 | AP377As/PCS46 | PmU.fA.mA.fA.mA.fG.mC.fA.mA.fA.mA.fC.mA.fG.mG.fU. |
| NO: 69 | | | mC.fU.mA.fA.mG.fU.mA.fU.mU.fC.mU.fC.mA.fG.mU.fG. |
| | | | mC.fA |
| SEQ ID | 10 | AP377As/PCS53 | PmU.fA.mC.fA.mA.fA.mA.fG.mC.fA.mA.fA.mA.fC.mA.fG. |
| NO: 70 | | | mG.fU.mC.fA.mG.fU.mA.fU.mU.fC.mU.fC.mA.fG.mU.fG. |
| | | | mC.fA |
| SEQ ID | 11 | AP377As/PCS29 | PmU.fG.mC.fA.mA.fA.mA.fC.mA.fG.mG.fU.mC.fU.mA.fG. |
| NO: 71 | | | mA.fA.mA.fA.mG.fU.mA.fU.mU.fC.mU.fC.mA.fG.mU.fG. |
| | | | mC.fA |
| SEQ ID | 12 | AP377As/PCS57 | PmU.fC.mA.fA.mA.fA.mG.fC.mA.fA.mA.fA.mC.fA.mG.fG. |
| NO: 72 | | | mU.fC.mU.fA.mG.fU.mA.fU.mU.fC.mU.fC.mA.fG.mU.fG. |
| | | | mC.fA |
| SEQ ID | 13 | AP377As/PCS52 | PmU.fA.mG.fA.mA.fU.mA.fA.mA.fU.mA.fU.mC.fU.mU.fC. |
| NO: 73 | | | mA.fA.mG.fA.mG.fU.mA.fU.mU.fC.mU.fC.mA.fG.mU.fG. |
| | | | mC.fA |
| SEQ ID | 14 | AP377As/PCS55 | PmU.fA.mA.fA.mG.fC.mA.fA.mA.fA.mC.fA.mG.fG.mU.fC. |
| NO: 74 | | | mU.fA.mG.fA.mG.fU.mA.fU.mU.fC.mU.fC.mA.fG.mU.fG. |
| | | | mC.fA |
| SEQ ID | 15 | AP028As/PCS44 | PmU.fC.mU.fU.mC.fA.mA.fG.mU.fU.mA.fC.mA.fA.mA.fA. |
| NO: 75 | | | mG.fC.mA.fG.mG.fU.mA.fC.mU.fC.mC.fU.mU.fG.mU.fU. |
| | | | mG.fA |
| SEQ ID | 16 | AP028As/PCS46 | PmU.fA.mA.fA.mA.fG.mC.fA.mA.fA.mA.fC.mA.fG.mG.fU. |
| NO: 76 | | | mC.fU.mA.fG.mG.fU.mA.fC.mU.fC.mC.fU.mU.fG.mU.fU. |
| | | | mG.fA |
| SEQ ID | 17 | AP028As/PCS53 | PmU.fA.mC.fA.mA.fA.mA.fG.mC.fA.mA.fA.mA.fC.mA.fG. |
| NO: 77 | | | mG.fU.mC.fG.mG.fU.mA.fC.mU.fC.mC.fU.mU.fG.mU.fU. |
| | | | mG.fA |
| SEQ ID | 18 | AP028As/PCS29 | PmU.fG.mC.fA.mA.fA.mA.fC.mA.fG.mG.fU.mC.fU.mA.fG. |
| NO: 78 | | | mA.fA.mA.fG.mG.fU.mA.fC.mU.fC.mC.fU.mU.fG.mU.fU. |
| | | | mG.fA |
| SEQ ID | 19 | AP028As/PCS57 | PmU.fC.mA.fA.mA.fA.mG.fC.mA.fA.mA.fA.mC.fA.mG.fG. |
| NO: 79 | | | mU.fC.mU.fG.mG.fU.mA.fC.mU.fC.mC.fU.mU.fG.mU.fU. |
| | | | mG.fA |
| SEQ ID | 20 | AP028As/PCS52 | PmU.fA.mG.fA.mA.fU.mA.fA.mA.fU.mA.fU.mC.fU.mU.fC. |
| NO: 80 | | | mA.fA.mG.fG.mG.fU.mA.fC.mU.fC.mC.fU.mU.fG.mU.fU. |
| | | | mG.fA |
| SEQ ID | 21 | AP028As/PCS55 | PmU.fA.mA.fA.mG.fC.mA.fA.mA.fA.mC.fA.mG.fG.mU.fC. |
| NO: 81 | | | mU.fA.mG.fG.mG.fU.mA.fC.mU.fC.mC.fU.mU.fG.mU.fU. |
| | | | mG.fA |
| SEQ ID | 22 | AP369As/PCS44 | PmU.fC.mU.fU.mC.fA.mA.fG.mU.fU.mA.fC.mA.fA.mA.fA. |
| NO: 82 | | | mG.fC.mA.fU.mA.fA.mA.fG.mC.fU.mG.fG.mA.fC.mA.fA. |
| | | | mG.fA |
| SEQ ID | 23 | AP369As/PCS46 | PmU.fA.mA.fA.mA.fG.mC.fA.mA.fA.mA.fC.mA.fG.mG.fU. |
| NO: 83 | | | mC.fU.mA.fU.mA.fA.mA.fG.mC.fU.mG.fG.mA.fC.mA.fA. |
| | | | mG.fA |
| SEQ ID | 24 | AP369As/PCS53 | PmU.fA.mC.fA.mA.fA.mA.fG.mC.fA.mA.fA.mA.fC.mA.fG. |
| NO: 84 | | | mG.fU.mC.fU.mA.fA.mA.fG.mC.fU.mG.fG.mA.fC.mA.fA. |
| | | | mG.fA |
| SEQ ID | 25 | AP369As/PCS29 | PmU.fG.mC.fA.mA.fA.mA.fC.mA.fG.mG.fU.mC.fU.mA.fG. |
| NO: 85 | | | mA.fA.mA.fU.mA.fA.mA.fG.mC.fU.mG.fG.mA.fC.mA.fA. |
| | | | mG.fA |
| SEQ ID | 26 | AP369As/PCS57 | PmU.fC.mA.fA.mA.fA.mG.fC.mA.fA.mA.fA.mC.fA.mG.fG. |
| NO: 86 | | | mU.fC.mU.fU.mA.fA.mA.fG.mC.fU.mG.fG.mA.fC.mA.fA. |
| | | | mG.fA |
| SEQ ID | 27 | AP369As/PCS52 | PmU.fA.mG.fA.mA.fU.mA.fA.mA.fU.mA.fU.mC.fU.mU.fC. |
| NO: 87 | | | mA.fA.mG.fU.mA.fA.mA.fG.mC.fU.mG.fG.mA.fC.mA.fA. |
| | | | mG.fA |
| SEQ ID | 28 | AP369As/PCS55 | PmU.fA.mA.fA.mG.fC.mA.fA.mA.fA.mC.fA.mG.fG.mU.fC. |
| NO: 88 | | | mU.fA.mG.fU.mA.fA.mA.fG.mC.fU.mG.fG.mA.fC.mA.fA. |
| | | | mG.fA |
| SEQ ID | 29 | AP366AS/PCS44 | PmU.fC.mU.fU.mC.fA.mA.fG.mU.fU.mA.fC.mA.fA.mA.fA. |
| NO: 89 | | | mG.fC.mA.fC.mC.fA.mA.fU.mA.fA.mA.fG.mC.fU.mG.fG. |
| | | | mA.fA |
| SEQ ID | 30 | AP366AS/PCS46 | PmU.fA.mA.fA.mA.fG.mC.fA.mA.fA.mA.fC.mA.fG.mG.fU. |
| NO: 90 | | | mC.fU.mA.fC.mC.fA.mA.fU.mA.fA.mA.fG.mC.fU.mG.fG. |
| | | | mA.fA |
| SEQ ID | 31 | AP366AS/PCS53 | PmU.fA.mC.fA.mA.fA.mA.fG.mC.fA.mA.fA.mA.fC.mA.fG. |
| NO: 91 | | | mG.fU.mC.fC.mC.fA.mA.fU.mA.fA.mA.fG.mC.fU.mG.fG. |
| | | | mA.fA |
| SEQ ID | 32 | AP366AS/PCS29 | PmU.fG.mC.fA.mA.fA.mA.fC.mA.fG.mG.fU.mC.fU.mA.fG. |
| NO: 92 | | | mA.fA.mA.fC.mC.fA.mA.fU.mA.fA.mA.fG.mC.fU.mG.fG. |
| | | | mA.fA |
| SEQ ID | 33 | AP366AS/PCS57 | PmU.fC.mA.fA.mA.fA.mG.fC.mA.fA.mA.fA.mC.fA.mG.fG. |
| NO: 93 | | | mU.fC.mU.fC.mC.fA.mA.fU.mA.fA.mA.fG.mC.fU.mG.fG. |
| | | | mA.fA |
| SEQ ID | 34 | AP366AS/PCS52 | PmU.fA.mG.fA.mA.fU.mA.fA.mA.fU.mA.fU.mC.fU.mU.fC. |
| NO: 94 | | | mA.fA.mG.fC.mC.fA.mA.fU.mA.fA.mA.fG.mC.fU.mG.fG. |
| | | | mA.fA |
| SEQ ID | 35 | AP366AS/PCS55 | PmU.fA.mA.fA.mG.fC.mA.fA.mA.fA.mC.fA.mG.fG.mU.fC. |
| NO: 95 | | | mU.fA.mG.fC.mC.fA.mA.fU.mA.fA.mA.fG.mC.fU.mG.fG. |
| | | | mA.fA |
| SEQ ID | 36 | AP367As/PCS44 | PmU.fC.mU.fU.mC.fA.mA.fG.mU.fU.mA.fC.mA.fA.mA.fA. |
| NO: 96 | | | mG.fC.mA.fC.mA.fA.mU.fA.mA.fA.mG.fC.mU.fG.mG.fA. |
| | | | mC.fA |
| SEQ ID | 37 | AP367As/PCS46 | PmU.fA.mA.fA.mA.fG.mC.fA.mA.fA.mA.fC.mA.fG.mG.fU. |
| NO: 97 | | | mC.fU.mA.fC.mA.fA.mU.fA.mA.fA.mG.fC.mU.fG.mG.fA. |
| | | | mC.fA |
| SEQ ID | 38 | AP367As/PCS53 | PmU.fA.mC.fA.mA.fA.mA.fG.mC.fA.mA.fA.mA.fC.mA.fG. |
| NO: 98 | | | mG.fU.mC.fC.mA.fA.mU.fA.mA.fA.mG.fC.mU.fG.mG.fA. |
| | | | mC.fA |
| SEQ ID | 39 | AP367As/PCS29 | PmU.fG.mC.fA.mA.fA.mA.fC.mA.fG.mG.fU.mC.fU.mA.fG. |
| NO: 99 | | | mA.fA.mA.fC.mA.fA.mU.fA.mA.fA.mG.fC.mU.fG.mG.fA. |
| | | | mC.fA |
| SEQ ID | 40 | AP367As/PCS57 | PmU.fC.mA.fA.mA.fA.mG.fC.mA.fA.mA.fA.mC.fA.mG.fG. |
| NO: 100 | | | mU.fC.mU.fC.mA.fA.mU.fA.mA.fA.mG.fC.mU.fG.mG.fA. |
| | | | mC.fA |
| SEQ ID | 41 | AP367As/PCS52 | PmU.fA.mG.fA.mA.fU.mA.fA.mA.fU.mA.fU.mC.fU.mU.fC. |
| NO: 101 | | | mA.fA.mG.fC.mA.fA.mU.fA.mA.fA.mG.fC.mU.fG.mG.fA. |
| | | | mC.fA |
| SEQ ID | 42 | AP367As/PCS55 | PmU.fA.mA.fA.mG.fC.mA.fA.mA.fA.mC.fA.mG.fG.mU.fC. |
| NO: 102 | | | mU.fA.mG.fC.mA.fA.mU.fA.mA.fA.mG.fC.mU.fG.mG.fA. |
| | | | mC.fA |
| SEQ ID | 43 | AP336AS/PCS44 | PmU.fC.mU.fU.mC.fA.mA.fG.mU.fU.mA.fC.mA.fA.mA.fA. |
| NO: 103 | | | mG.fC.mA.fC.mA.fG.mU.fA.mU.fU.mC.fU.mC.fA.mG.fU. |
| | | | mG.fA |
| SEQ ID | 44 | AP336AS/PCS46 | PmU.fA.mA.fA.mA.fG.mC.fA.mA.fA.mA.fC.mA.fG.mG.fU. |
| NO: 104 | | | mC.fU.mA.fC.mA.fG.mU.fA.mU.fU.mC.fU.mC.fA.mG.fU. |
| | | | mG.fA |
| SEQ ID | 45 | AP336AS/PCS53 | PmU.fA.mC.fA.mA.fA.mA.fG.mC.fA.mA.fA.mA.fC.mA.fG. |
| NO: 105 | | | mG.fU.mC.fC.mA.fG.mU.fA.mU.fU.mC.fU.mC.fA.mG.fU. |
| | | | mG.fA |
| SEQ ID | 46 | AP336AS/PCS29 | PmU.fG.mC.fA.mA.fA.mA.fC.mA.fG.mG.fU.mC.fU.mA.fG. |
| NO: 106 | | | mA.fA.mA.fC.mA.fG.mU.fA.mU.fU.mC.fU.mC.fA.mG.fU. |
| | | | mG.fA |
| SEQ ID | 47 | AP336AS/PCS57 | PmU.fC.mA.fA.mA.fA.mG.fC.mA.fA.mA.fA.mC.fA.mG.fG. |
| NO: 107 | | | mU.fC.mU.fC.mA.fG.mU.fA.mU.fU.mC.fU.mC.fA.mG.fU. |
| | | | mG.fA |
| SEQ ID | 48 | AP336AS/PCS52 | PmU.fA.mG.fA.mA.fU.mA.fA.mA.fU.mA.fU.mC.fU.mU.fC. |
| NO: 108 | | | mA.fA.mG.fC.mA.fG.mU.fA.mU.fU.mC.fU.mC.fA.mG.fU. |
| | | | mG.fA |
| SEQ ID | 49 | AP336AS/PCS55 | PmU.fA.mA.fA.mG.fC.mA.fA.mA.fA.mC.fA.mG.fG.mU.fC. |
| NO: 109 | | | mU.fA.mG.fC.mA.fG.mU.fA.mU.fU.mC.fU.mC.fA.mG.fU. |
| | | | mG.fA |
| SEQ ID | 50 | AP277/PCS29 | [mU][#][fG][#][mC][fA][mA][fA][mA][fC][mA][fG][mG] |
| NO: 110 | | | [fU][mC][fU][#][mA][#][fG][#][mA][#][fA][#][rA][mA][#] |
| | | | [fC][#][mC][fU][mG][fC][mC][fU][mA][fU][mC][mC][#] |
| | | | [mA][#][mA][#][3XGalNac] |
| SEQ ID | 51 | AP277/PCS52 | [mU][#][fA][#][mG][fA][mA][fU][mA][fA][mA][fU][mA] |
| NO: 111 | | | [fU][mC][fU][#][mU][#][fC][#][mA][#][fA][#][rG][mA][#] |
| | | | [fC][#][mC][fU][mG][fC][mC][fU][mA][fU][mC][mC][#] |
| | | | [mA][#][mA][#][3XGalNac] |
| SEQ ID | 52 | AP28/PCS48 | [mU][#][fG][#][mU][fG][mA][fC][mA][fC][mA][fA][mA] |
| NO: 112 | | | [fG][mC][fA][#][mG][#][fG][#][mU][#][fG][#][rC][mG][#] |
| | | | [fU][#][mA][fC][mU][fC][mC][fU][mU][fG][mU][mu][#] |
| | | | [mG][#][mA][#][3XGalNAc] |
| SEQ ID | 53 | AP277/PCS48 | [mU][#][fG][#][mU][fG][mA][fC][mA][fC][mA][fA][mA] |
| NO: 113 | | | [fG][mC][fA][#][mG][#][fG][#][mU][#][fG][#][rC][mA][#] |
| | | | [fC][#][mC][fU][mG][fC][mC][fU][mA][fU][mC][mC][#] |
| | | | [mA][#][mA][#][3XGalNac] |
| SEQ ID | 54 | AP337/PCS44 | [mU][#][fC][#][mU][fU][mC][fA][mA][fG][mU][fU][mA] |
| NO: 114 | | | [fC][#][mA][#][fA][#][mA][#][fA][#][mG][#][fC][#][rA][mG] |
| | | | [#][fU][#][mA][fU][mU][fC][mU][fC][mA][fG][mU][fG][#] |
| | | | [mC][#][fA][#][3xGalNac] |

[0295] Table 5b shows linked second and third nucleic acid portions of the molecules. Linking is direct to give rise to a single contiguous strand.

| | | | |
|---|---|---|---|
| SEQ ID | 1 | AP277AS/PCS44 | PmU.fU.mG.fG.mA.fU.mA.fG.mG.fC.mA.fG.mG.fU.mG.fG. |
| NO: 115 | | | mA.fC.mU.fU.mU.fU.mG.fU.mA.fA.mC.fU.mU.fG.mA.fA. |
| | | | mG.fA |
| SEQ ID | 2 | AP277AS/PCS46 | PmU.fU.mG.fG.mA.fU.mA.fG.mG.fC.mA.fG.mG.fU.mG.fG. |
| NO: 116 | | | mA.fC.mU.fC.mC.fU.mG.fU.mU.fU.mU.fG.mC.fU.mU.fU. |
| | | | mU.fA |
| SEQ ID | 3 | AP277AS/PCS53 | PmU.fU.mG.fG.mA.fU.mA.fG.mG.fC.mA.fG.mG.fU.mG.fG. |
| NO: 117 | | | mA.fC.mU.fU.mG.fU.mU.fU.mU.fG.mC.fU.mU.fU.mU.fG. |
| | | | mU.fA |
| SEQ ID | 4 | AP277AS/PCS29 | PmU.fU.mG.fG.mA.fU.mA.fG.mG.fC.mA.fG.mG.fU.mG.fG. |
| NO: 118 | | | mA.fC.mU.fU.mA.fG.mA.fC.mC.fU.mG.fU.mU.fU.mU.fG. |
| | | | mC.fA |
| SEQ ID | 5 | AP277AS/PCS57 | PmU.fU.mG.fG.mA.fU.mA.fG.mG.fC.mA.fG.mG.fU.mG.fG. |
| NO: 119 | | | mA.fC.mU.fC.mU.fG.mU.fU.mU.fU.mG.fC.mU.fU.mU.fU. |
| | | | mG.fA |
| SEQ ID | 6 | AP277AS/PCS52 | PmU.fU.mG.fG.mA.fU.mA.fG.mG.fC.mA.fG.mG.fU.mG.fG. |
| NO: 120 | | | mA.fC.mU.fA.mA.fG.mA.fU.mA.fU.mU.fU.mA.fU.mU.fC. |
| | | | mU.fA |
| SEQ ID | 7 | AP277AS/PCS55 | PmU.fU.mG.fG.mA.fU.mA.fG.mG.fC.mA.fG.mG.fU.mG.fG. |
| NO: 121 | | | mA.fC.mU.fA.mC.fC.mU.fG.mU.fU.mU.fU.mG.fC.mU.fU. |
| | | | mU.fA |
| SEQ ID | 8 | AP377As/PCS44 | PmU.fG.mC.fA.mC.fU.mG.fA.mG.fA.mA.fU.mA.fC.mU.fG. |
| NO: 122 | | | mU.fC.mC.fU.mU.fU.mG.fU.mA.fA.mC.fU.mU.fG.mA.fA. |
| | | | mG.fA |
| SEQ ID | 9 | AP377As/PCS46 | PmU.fG.mC.fA.mC.fU.mG.fA.mG.fA.mA.fU.mA.fC.mU.fG. |
| NO: 123 | | | mU.fC.mC.fC.mC.fU.mG.fU.mU.fU.mU.fG.mC.fU.mU.fU. |
| | | | mU.fA |
| SEQ ID | 10 | AP377As/PCS53 | PmU.fG.mC.fA.mC.fU.mG.fA.mG.fA.mA.fU.mA.fC.mU.fG. |
| NO: 124 | | | mU.fC.mC.fU.mG.fU.mU.fU.mU.fG.mC.fU.mU.fU.mU.fG. |
| | | | mU.fA |
| SEQ ID | 11 | AP377As/PCS29 | PmU.fG.mC.fA.mC.fU.mG.fA.mG.fA.mA.fU.mA.fC.mU.fG. |
| NO: 125 | | | mU.fC.mC.fU.mA.fG.mA.fC.mC.fU.mG.fU.mU.fU.mU.fG. |
| | | | mC.fA |
| SEQ ID | 12 | AP377As/PCS57 | PmU.fG.mC.fA.mC.fU.mG.fA.mG.fA.mA.fU.mA.fC.mU.fG. |
| NO: 126 | | | mU.fC.mC.fC.mU.fG.mU.fU.mU.fU.mG.fC.mU.fU.mU.fU. |
| | | | mG.fA |
| SEQ ID | 13 | AP377As/PCS52 | PmU.fG.mC.fA.mC.fU.mG.fA.mG.fA.mA.fU.mA.fC.mU.fG. |
| NO: 127 | | | mU.fC.mC.fA.mA.fG.mA.fU.mA.fU.mU.fU.mA.fU.mU.fC. |
| | | | mU.fA |
| SEQ ID | 14 | AP377As/PCS55 | PmU.fG.mC.fA.mC.fU.mG.fA.mG.fA.mA.fU.mA.fC.mU.fG. |
| NO: 128 | | | mU.fC.mC.fA.mC.fC.mU.fG.mU.fU.mU.fU.mG.fC.mU.fU. |
| | | | mU.fA |
| SEQ ID | 15 | AP028As/PCS44 | PmU.fC.mA.fA.mC.fA.mA.fG.mG.fA.mG.fU.mA.fC.mC.fC. |
| NO: 129 | | | mG.fG.mG.fU.mU.fU.mG.fU.mA.fA.mC.fU.mU.fG.mA.fA. |
| | | | mG.fA |
| SEQ ID | 16 | AP028As/PCS46 | PmU.fC.mA.fA.mC.fA.mA.fG.mG.fA.mG.fU.mA.fC.mC.fC. |
| NO: 130 | | | mG.fG.mG.fC.mC.fU.mG.fU.mU.fU.mU.fG.mC.fU.mU.fU. |
| | | | mU.fA |
| SEQ ID | 17 | AP028As/PCS53 | PmU.fC.mA.fA.mC.fA.mA.fG.mG.fA.mG.fU.mA.fC.mC.fC. |
| NO: 131 | | | mG.fG.mG.fU.mG.fU.mU.fU.mU.fG.mC.fU.mU.fU.mU.fG. |
| | | | mU.fA |
| SEQ ID | 18 | AP028As/PCS29 | PmU.fC.mA.fA.mC.fA.mA.fG.mG.fA.mG.fU.mA.fC.mC.fC. |
| NO: 132 | | | mG.fG.mG.fU.mA.fG.mA.fC.mC.fU.mG.fU.mU.fU.mU.fG. |
| | | | mC.fA |
| SEQ ID | 19 | AP028As/PCS57 | PmU.fC.mA.fA.mC.fA.mA.fG.mG.fA.mG.fU.mA.fC.mC.fC. |
| NO: 133 | | | mG.fG.mG.fC.mU.fG.mU.fU.mU.fU.mG.fC.mU.fU.mU.fU. |
| | | | mG.fA |
| SEQ ID | 20 | AP028As/PCS52 | PmU.fC.mA.fA.mC.fA.mA.fG.mG.fA.mG.fU.mA.fC.mC.fC. |
| NO: 134 | | | mG.fG.mG.fA.mA.fG.mA.fU.mA.fU.mU.fU.mA.fU.mU.fC. |
| | | | mU.fA |
| SEQ ID | 21 | AP028As/PCS55 | PmU.fC.mA.fA.mC.fA.mA.fG.mG.fA.mG.fU.mA.fC.mC.fC. |
| NO: 135 | | | mG.fG.mG.fA.mC.fC.mU.fG.mU.fU.mU.fU.mG.fC.mU.fU. |
| | | | mU.fA |
| SEQ ID | 22 | AP369As/PCS44 | PmU.fC.mU.fU.mG.fU.mC.fC.mA.fG.mC.fU.mU.fU.mA.fU. |
| NO: 136 | | | mU.fG.mG.fU.mU.fU.mG.fU.mA.fA.mC.fU.mU.fG.mA.fA. |
| | | | mG.fA |
| SEQ ID | 23 | AP369As/PCS46 | PmU.fC.mU.fU.mG.fU.mC.fC.mA.fG.mC.fU.mU.fU.mA.fU. |
| NO: 137 | | | mU.fG.mG.fC.mC.fU.mG.fU.mU.fU.mU.fG.mC.fU.mU.fU. |
| | | | mU.fA |
| SEQ ID | 24 | AP369As/PCS53 | PmU.fC.mU.fU.mG.fU.mC.fC.mA.fG.mC.fU.mU.fU.mA.fU. |
| NO: 138 | | | mU.fG.mG.fU.mG.fU.mU.fU.mU.fG.mC.fU.mU.fU.mU.fG. |
| | | | mU.fA |
| SEQ ID | 25 | AP369As/PCS29 | PmU.fC.mU.fU.mG.fU.mC.fC.mA.fG.mC.fU.mU.fU.mA.fU. |
| NO: 139 | | | mU.fG.mG.fU.mA.fG.mA.fC.mC.fU.mG.fU.mU.fU.mU.fG. |
| | | | mC.fA |
| SEQ ID | 26 | AP369As/PCS57 | PmU.fC.mU.fU.mG.fU.mC.fC.mA.fG.mC.fU.mU.fU.mA.fU. |
| NO: 140 | | | mU.fG.mG.fC.mU.fG.mU.fU.mU.fU.mG.fC.mU.fU.mU.fU. |
| | | | mG.fA |
| SEQ ID | 27 | AP369As/PCS52 | PmU.fC.mU.fU.mG.fU.mC.fC.mA.fG.mC.fU.mU.fU.mA.fU. |
| NO: 141 | | | mU.fG.mG.fA.mA.fG.mA.fU.mA.fU.mU.fU.mA.fU.mU.fC. |
| | | | mU.fA |
| SEQ ID | 28 | AP369As/PCS55 | PmU.fC.mU.fU.mG.fU.mC.fC.mA.fG.mC.fU.mU.fU.mA.fU. |
| NO: 142 | | | mU.fG.mG.fA.mC.fC.mU.fG.mU.fU.mU.fU.mG.fC.mU.fU. |
| | | | mU.fA |
| SEQ ID | 29 | AP366AS/PCS44 | PmU.fU.mC.fC.mA.fG.mC.fU.mU.fU.mA.fU.mU.fG.mG.fG. |
| NO: 143 | | | mA.fG.mG.fU.mU.fU.mG.fU.mA.fA.mC.fU.mU.fG.mA.fA. |
| | | | mG.fA |
| SEQ ID | 30 | AP366AS/PCS46 | PmU.fU.mC.fC.mA.fG.mC.fU.mU.fU.mA.fU.mU.fG.mG.fG. |
| NO: 144 | | | mA.fG.mG.fC.mC.fU.mG.fU.mU.fU.mU.fG.mC.fU.mU.fU. |
| | | | mU.fA |
| SEQ ID | 31 | AP366AS/PCS53 | PmU.fU.mC.fC.mA.fG.mC.fU.mU.fU.mA.fU.mU.fG.mG.fG. |
| NO: 145 | | | mA.fG.mG.fU.mG.fU.mU.fU.mU.fG.mC.fU.mU.fU.mU.fG. |
| | | | mU.fA |
| SEQ ID | 32 | AP366AS/PCS29 | PmU.fU.mC.fC.mA.fG.mC.fU.mU.fU.mA.fU.mU.fG.mG.fG. |
| NO: 146 | | | mA.fG.mG.fU.mA.fG.mA.fC.mC.fU.mG.fU.mU.fU.mU.fG. |
| | | | mC.fA |
| SEQ ID | 33 | AP366AS/PCS57 | PmU.fU.mC.fC.mA.fG.mC.fU.mU.fU.mA.fU.mU.fG.mG.fG. |
| NO: 147 | | | mA.fG.mG.fC.mU.fG.mU.fU.mU.fU.mG.fC.mU.fU.mU.fU. |
| | | | mG.fA |
| SEQ ID | 34 | AP366AS/PCS52 | PmU.fU.mC.fC.mA.fG.mC.fU.mU.fU.mA.fU.mU.fG.mG.fG. |
| NO: 148 | | | mA.fG.mG.fA.mA.fG.mA.fU.mA.fU.mU.fU.mA.fU.mU.fC. |
| | | | mU.fA |
| SEQ ID | 35 | AP366AS/PCS55 | PmU.fU.mC.fC.mA.fG.mC.fU.mU.fU.mA.fU.mU.fG.mG.fG. |
| NO: 149 | | | mA.fG.mG.fA.mC.fC.mU.fG.mU.fU.mU.fU.mG.fC.mU.fU. |
| | | | mU.fA |
| SEQ ID | 36 | AP367As/PCS44 | PmU.fG.mU.fC.mC.fA.mG.fC.mU.fU.mU.fA.mU.fU.mG.fG. |
| NO: 150 | | | mG.fA.mG.fU.mU.fU.mG.fU.mA.fA.mC.fU.mU.fG.mA.fA. |
| | | | mG.fA |
| SEQ ID | 37 | AP367As/PCS46 | PmU.fG.mU.fC.mC.fA.mG.fC.mU.fU.mU.fA.mU.fU.mG.fG. |
| NO: 151 | | | mG.fA.mG.fC.mC.fU.mG.fU.mU.fU.mU.fG.mC.fU.mU.fU. |
| | | | mU.fA |
| SEQ ID | 38 | AP367As/PCS53 | PmU.fG.mU.fC.mC.fA.mG.fC.mU.fU.mU.fA.mU.fU.mG.fG |
| NO: 152 | | | mG.fA.mG.fU.mG.fU.mU.fU.mU.fG.mC.fU.mU.fU.mU.fG. |
| | | | mU.fA |
| SEQ ID | 39 | AP367As/PCS29 | PmU.fG.mU.fC.mC.fA.mG.fC.mU.fU.mU.fA.mU.fU.mG.fG. |
| NO: 153 | | | mG.fA.mG.fU.mA.fG.mA.fC.mC.fU.mG.fU.mU.fU.mU.fG. |
| | | | mC.fA |
| SEQ ID | 40 | AP367As/PCS57 | PmU.fG.mU.fC.mC.fA.mG.fC.mU.fU.mU.fA.mU.fU.mG.fG. |
| NO: 154 | | | mG.fA.mG.fC.mU.fG.mU.fU.mU.fU.mG.fC.mU.fU.mU.fU. |
| | | | mG.fA |
| SEQ ID | 41 | AP367As/PCS52 | PmU.fG.mU.fC.mC.fA.mG.fC.mU.fU.mU.fA.mU.fU.mG.fG. |
| NO: 155 | | | mG.fA.mG.fA.mA.fG.mA.fU.mA.fU.mU.fU.mA.fU.mU.fC. |
| | | | mU.fA |
| SEQ ID | 42 | AP367As/PCS55 | PmU.fG.mU.fC.mC.fA.mG.fC.mU.fU.mU.fA.mU.fU.mG.fG. |
| NO: 156 | | | mG.fA.mG.fA.mC.fC.mU.fG.mU.fU.mU.fU.mG.fC.mU.fU. |
| | | | mU.fA |
| SEQ ID | 43 | AP336AS/PCS44 | PmU.fC.mA.fC.mU.fG.mA.fG.mA.fA.mU.fA.mC.fU.mG.fU. |
| NO: 157 | | | mC.fC.mC.fU.mU.fU.mG.fU.mA.fA.mC.fU.mU.fG.mA.fA. |
| | | | mG.fA |
| SEQ ID | 44 | AP336AS/PCS46 | PmU.fC.mA.fC.mU.fG.mA.fG.mA.fA.mU.fA.mC.fU.mG.fU. |
| NO: 158 | | | mC.fC.mC.fC.mC.fU.mG.fU.mU.fU.mU.fG.mC.fU.mU.fU. |
| | | | mU.fA |
| SEQ ID | 45 | AP336AS/PCS53 | PmU.fC.mA.fC.mU.fG.mA.fG.mA.fA.mU.fA.mC.fU.mG.fU. |
| NO: 159 | | | mC.fC.mC.fU.mG.fU.mU.fU.mU.fG.mC.fU.mU.fU.mU.fG. |
| | | | mU.fA |
| SEQ ID | 46 | AP336AS/PCS29 | PmU.fC.mA.fC.mU.fG.mA.fG.mA.fA.mU.fA.mC.fU.mG.fU. |
| NO: 160 | | | mC.fC.mC.fU.mA.fG.mA.fC.mC.fU.mG.fU.mU.fU.mU.fG. |
| | | | mC.fA |
| SEQ ID | 47 | AP336AS/PCS57 | PmU.fC.mA.fC.mU.fG.mA.fG.mA.fA.mU.fA.mC.fU.mG.fU. |
| NO: 161 | | | mC.fC.mC.fC.mU.fG.mU.fU.mU.fU.mG.fC.mU.fU.mU.fU. |
| | | | mG.fA |
| SEQ ID | 48 | AP336AS/PCS52 | PmU.fC.mA.fC.mU.fG.mA.fG.mA.fA.mU.fA.mC.fU.mG.fU. |
| NO: 162 | | | mC.fC.mC.fA.mA.fG.mA.fU.mA.fU.mU.fU.mA.fU.mU.fC. |
| | | | mU.fA |
| SEQ ID | 49 | AP336AS/PCS55 | PmU.fC.mA.fC.mU.fG.mA.fG.mA.fA.mU.fA.mC.fU.mG.fU. |
| NO: 163 | | | mC.fC.mC.fA.mC.fC.mU.fG.mU.fU.mU.fU.mG.fC.mU.fU. |
| | | | mU.fA |
| SEQ ID | 50 | AP277/PCS29 | [mU][#][U][#][mG][fG][mA][fU][mA][fG][mG][fC][mA] |
| NO: 164 | | | [fG][mG][f][#][mG][#][fG][#][mA][#][fC][#][rU][mA][#] |
| | | | [fG][#][mA][fC][mC][fU][mG][fU][mU][fU][mU][mG][#] |
| | | | [mC][#][mA][#][3XGalNAc] |
| SEQ ID | 51 | AP277/PCS52 | [mU][#][fU][#][mG][fG][mA][fU][mA][fG][mG][fC][mA] |
| NO: 165 | | | [fG][mG][fU][#][mG][#][fG][#][mA][#][fC][#][rU][mA][#] |
| | | | [fG][#][mA][fU][mA][fU][mU][fU][mA][fU][mU][mC][#] |
| | | | [mU][#][mA][#][3XGalNac] |
| SEQ ID | 52 | AP28/PCS48 | [mU][#][fC][#][mA][fA][mC][fA][mA][fG][mG][fA][mG] |
| NO: 166 | | | [fU][mA][fC][#][mC][#][fC][#][mG][#][fG][#][rG][mU][#] |
| | | | [fG][#][mC][fU][mU][fU][mG][fU][mG][fU][mC][mA][#] |
| | | | [mC][#][mA][#][3XGalNAc] |
| SEQ ID | 53 | AP277/PCS48 | [mU][#][fU][#][mG][fG][mA][fU][mA][fG][mG][fC][mA] |
| NO: 167 | | | [fG][mG][fU][#][mG][#][fG][#][mA][#][fC][#][rU][mU][#] |
| | | | [fG][#][mC][fU][mU][fU][mG][fU][mG][fU][mC][mA][#] |
| | | | [mC][#][mA][#][3XGalNAc] |
| SEQ ID | 54 | AP337/PCS44 | [mU][#][fG][#][mC][fA][mC][fU][mG][fA][mG][fA][mA] |
| NO: 168 | | | [fU][#][mA][#][fC][#][mU][#][fG][#][mU][#][fC][#][rC][mU] |
| | | | [#][fU][mG][fU][mA][fA][mC][fU][mU][fG][mA][fA][#] |
| | | | [mG][#][fA][#][3xGalNac] |

[0296] While the methods are shown and described as being a series of acts that are performed in a specific sequence, it is to be understood and appreciated that the methods are not limited by the order of the sequence. For example, some acts can occur in a different order than what is described herein. In addition, an act can occur concurrently with another act. Further, in some instances, not all acts may be required to implement a method described herein.

[0297] The order of the steps of the methods described herein is exemplary, but the steps may be carried out in any suitable order, or simultaneously where appropriate. Additionally, steps may be added or substituted in, or individual steps may be deleted from any of the methods without departing from the scope of the subject matter described herein. Aspects of any of the Examples described above may be combined with aspects of any of the other Examples described to form further Examples.

[0298] It will be understood that the above descriptions of particular embodiments are provided by way of example only and that various modifications may be made by those skilled in the art. What has been described above includes Examples of one or more embodiments. It is, of course, not possible to describe every conceivable modification and alteration of the above compounds, compositions or methods for purposes of describing the aforementioned aspects, but one of ordinary skill in the art can recognize that many further modifications and permutations of various aspects are possible. Accordingly, the described aspects are intended to embrace all such alterations, modifications, and variations that fall within the scope of the appended claims.

### EXAMPLES

[0299] The following Examples illustrate certain embodiments of the present disclosure and are not limiting. Moreover, where specific embodiments are provided, the inventors have contemplated generic application of those specific embodiments. For example, disclosure of a construct having a specific motif or modification patterns provides reasonable support for additional constructs having the same or similar motif or modification patterns.

[0300] The syntheses of the RNAi constructs, e.g., muRNA constructs, disclosed herein have been carried out using synthesis methods known to the person skilled in the art, such as synthesis methods disclosed in https://en.wikipedia.org/wiki/Oligonucleotide_synthesis {retrieved on 16 Feb. 2022}, where the methods disclosed on this website are incorporated by reference herein in their entirety. The only difference to the synthesis method disclosed in this reference is that GalNAc phosphoramidite immobilized on a support is used in the synthesis method during the first synthesis step.

### Example 1

[0301] Materials and Methods

[0302] Cell Culture:

[0303] HepG2 (ATCC cat. 85011430) cells were maintained by biweekly passing in EMEM supplemented with 10% FBS, 20 mM L-glutamine, 10 mM HEPES pH 7.2, 1 mM sodium pyruvate, 1×MEM non-essential amino acids, and 1× Pen/Strep (EMEM complete).

[0304] PCSK9 and APOC3 Combo identification and compound preparation: Combination compounds with the best performing PCSK9 and APOC3 sequences were designed and synthesized as 49 candidates; see Table 5 above. Compounds were dissolved to 50 uM in molecular biology grade water and annealed by heating at 95 C for 5 minutes followed by gradual cooling to room temperature.

[0305] APOC3/PCSK9 Combo—Screen: Based on data from screens with PCSK9 and APOC3 duplexes, the best performing APOC3 and PCSK9 sequences were combined into 49 candidates and tested (combinations of numbers 1 to 49 of Tables 5a and 5b respectively, where constructs numbered equally have been combined) in dose curves. HepG2 cells were collected by trypsinization and seeded in 96 well tissue culture plates at 10,000 cells per well in 50 uL complete EMEM with 20% FBS and allowed to rest for 4 hours. Transfection complexes were formed by gently mixing 36 pmoles of each duplex in 180 uL OptiMEM with 2.16 uL RNAiMax in 180 uL OptiMEM to make 360 uL total complex. A two fold dilution series was then performed with basal OptiMEM. 50 uL of each dilution was added to respective triplicates of HepG2 cells to make a final dilution series of 50 nM down to 0.32 nM in a volume of 100 uL, 50/50 EMEM/OptiMEM at 10% FBS. 72 hours post transfection, cells were harvested and RNA isolated using the PureLink Pro 96 total RNA Purification Kit (ThermoFisher, 12173011A) according to the manufacturer protocol. Harvested RNA was assayed for both PCSK9 and APOC3 expression via Taqman qPCR using the Luna Universal Probe One-Step RT-qPCR Kit (NEB, E3006). Two separate qPCR assays were performed for each sample using an either an APOC3 Taqman probe (Hs00906501_g1-FAM) or PCSK9 probe (Hs00906501_g1-FAM) multiplexed with a common GAPDH VIC probe (ThermoFisher, 4326317E). Thermocycling and data acquisition was performed with an Applied Biosystems QuantStudio 3 Real-Time PCR System.

[0306] Results

[0307] Tables 6a and 6b below shows IC50 values (in nM) for specific constructs selected in accordance with the Examples. Table 6a shows PCSK9 knock-down, and Table 6b shows APOC3 knock-down. The numbers after “SR1-” in the first column correspond to the construct numbering in Tables 5a and 5b above.

TABLE 6a

| | | % KD at |
|---|---|---|
| Sequence | | highest Conc |
| ID | IC50 | (50 nM) |
| SR1-25 | 3.14 | 92 |
| SR1-26 | 5.07 | 85 |
| SR1-27 | 5.24 | 86 |
| SR1-31 | 5.56 | 91 |
| SR1-28 | 6.04 | 84 |
| SR1-24 | 5.85 | 84 |
| SR1-45 | 6.08 | 81 |
| SR1-22 | 6.37 | 83 |
| SR1-40 | 6.57 | 83 |
| SR1-47 | 6.59 | 81 |
| SR1-39 | 6.65 | 86 |
| SR1-32 | 7.31 | 86 |
| SR1-36 | 7.50 | 83 |
| SR1-18 | 7.57 | 86 |
| SR1-19 | 7.78 | 85 |
| SR1-49 | 8.13 | 76 |
| SR1-46 | 8.40 | 77 |
| SR1-38 | 8.45 | 85 |
| SR1-21 | 8.56 | 74 |
| SR1-23 | 8.60 | 74 |
| SR1-4 | 8.83 | 84 |
| SR1-34 | 8.86 | 86 |
| SR1-29 | 9.16 | 86 |
| SR1-17 | 9.27 | 78 |
| SR1-15 | 9.31 | 81 |
| SR1-37 | 9.58 | 75 |
| SR1-48 | 10.18 | 78 |
| SR1-1 | 10.23 | 80 |
| SR1-7 | 10.36 | 79 |
| SR1-33 | 10.37 | 83 |
| SR1-20 | 10.55 | 80 |
| SR1-35 | 10.79 | 78 |
| SR1-9 | 10.93 | 75 |
| SR1-3 | 12.03 | 78 |
| SR1-5 | 12.60 | 78 |
| SR1-2 | 14.01 | 76 |
| SR1-11 | 15.74 | 62 |
| SR1-16 | 16.02 | 73 |
| SR1-42 | 16.04 | 68 |
| SR1-41 | 16.76 | 81 |
| SR1-30 | 17.95 | 81 |
| SR1-6 | 18.14 | 73 |
| SR1-13 | 18.99 | 64 |
| SR1-43 | 19.41 | 69 |
| SR1-44 | 19.98 | 73 |
| SR1-10 | 21.05 | 64 |
| SR1-8 | 23.20 | 44 |
| SR1-14 | 24.16 | 44 |
| SR1-12 | 30.19 | 46 |

TABLE 6b

| | | % KD at |
|---|---|---|
| Sequence | | highest |
| ID | IC50 | Conc (50nM) |
| SR1-36 | 3.75 | 93 |
| SR1-25 | 4.01 | 93 |
| SR1-20 | 4.04 | 79 |
| SR1-40 | 4.44 | 93 |
| SR1-34 | 4.53 | 88 |
| SR1-4 | 4.80 | 84 |
| SR1-1 | 5.15 | 85 |
| SR1-26 | 5.23 | 88 |
| SR1-27 | 5.52 | 89 |
| SR1-45 | 5.81 | 93 |
| SR1-18 | 6.94 | 78 |
| SR1-19 | 6.97 | 70 |
| SR1-31 | 7.04 | 93 |
| SR1-35 | 7.59 | 79 |
| SR1-38 | 7.69 | 90 |
| SR1-24 | 7.86 | 81 |
| SR1-42 | 8.00 | 91 |
| SR1-47 | 8.13 | 88 |
| SR1-39 | 8.80 | 84 |
| SR1-29 | 8.87 | 88 |
| SR1-41 | 8.94 | 86 |
| SR1-49 | 8.94 | 83 |
| SR1-3 | 9.04 | 79 |
| SR1-46 | 9.11 | 84 |
| SR1-48 | 9.62 | 86 |
| SR1-2 | 10.14 | 76 |
| SR1-7 | 10.42 | 78 |
| SR1-44 | 10.45 | 87 |
| SR1-28 | 10.49 | 83 |
| SR1-22 | 10.72 | 80 |
| SR1-43 | 10.99 | 84 |
| SR1-37 | 11.43 | 81 |
| SR1-23 | 11.85 | 77 |
| SR1-32 | 11.96 | 80 |
| SR1-5 | 12.29 | 74 |
| SR1-21 | 13.94 | 71 |
| SR1-13 | 15.73 | 60 |
| SR1-8 | 15.90 | 63 |
| SR1-15 | 16.95 | 63 |
| SR1-30 | 17.59 | 83 |
| SR1-9 | 18.21 | 71 |
| SR1-6 | 18.70 | 69 |
| SR1-12 | 19.50 | 59 |
| SR1-17 | 20.07 | 48 |
| SR1-10 | 21.18 | 71 |
| SR1-16 | 23.41 | 61 |
| SR1-11 | 23.98 | 64 |
| SR1-33 | 33.86 | 49 |
| SR1-14 | 52.14 | 32 |

[0308] The IC₅₀ data in the single- to double-digit nanomolar range demonstrate outstanding performance of numerous constructs as described herein. Of note, either target of the double-targeting constructs is knocked down by each of a multitude of constructs.

### Example 2

[0309] Materials and Methods

[0310] Cell Culture:

[0311] Human primary hepatocytes (5 donor pooled—Sekisui XenoTech, HPCH05+) were thawed immediately prior to experimentation and cultured in 1× complete Williams medium (Gibco, A1217601) supplemented with Hepatocytes plating supplement pack (Gibco, CM3000). FBS concentration was modified from manufacture recipe to a final 2.5% (as opposed to 5%) for compound stability.

[0312] Identification and compound preparation for PCSK9 and APOC3 Combo containing GalNAc: Combination compounds with PCSK9 and APOC3 sequences were designed and synthesized. In some combination, the bulge in the central part of the molecule has 5 nucleotides in each strand (see Table 7a) whereas in other combination, the bulge in the central part of the molecule has 4 nucleotides (see Table 7b). Compounds were dissolved to 50 uM in molecular biology grade water and annealed by heating at 95° C. for 5 minutes followed by gradual cooling to room temperature.

TABLE 7a
GalNAc-containing muRNAs for ApoC3-PCSK9 with 5 nucleotides in the bulge
region, where the corresponding strands “S + AS”, e.g., Construct ID Nos. 1 + 2,
constitute an muRNA construct.

| SEQ ID | Construct | | | |
|---|---|---|---|---|
| NO: | ID No. | muRNA | Strand | Sequence |
| 169 | 1 | P29-A28 | S | [mU][#][fG][#][mC][fA][mA][fA][mA][fC] |
| | | | | [mA][fG][mG][fU][mC][fU][#][mA][#][fG] |
| | | | | [#][mA][#][A][#][rA][mG][#][fU][#][mA] |
| | | | | [fC][mU][fC][mC][fU][mU][fG][mU][mU][#] |
| | | | | [mG][#][mA][#][3XGalNAc] |
| 170 | 2 | P29-A28 | AS | [mU][#][fC][#][mA][fA][mC][fA][mA][fG] |
| | | | | [mG][fA][mG][fU][mA][fC][#][mC][#][fC] |
| | | | | [#][mG][#][fG][#][fG][mA][#][fG][#][mA] |
| | | | | [fC][mC][fU][mG][fU][mU][fU][mU][mG][#] |
| | | | | [mC][#][mA][#][3XGalNAc] |
| 110 | 3 | P29-A277 | S | [mU][#][fG][#][mC][fA][mA][fA][mA][fC] |
| | | | | [mA][fG][mG][fU][mC][fU][#][mA][#][fG] |
| | | | | [#][mA][#][fA][#][rA][mA][#][fC][#][mC] |
| | | | | [fU][mG][fC][mC][fU][mA][fU][mC][mC][#] |
| | | | | [mA][#][mA][#][3XGalNac] |
| 164 | 4 | P29-A277 | AS | [mU][#][fU][#][mG][fG][mA][fU][mA][fG] |
| | | | | [mG][fC][mA][fG][mG][fU][#][mG][#][fG] |
| | | | | [#][mA][#][fC][#][rU][mA][#][fG][#][mA] |
| | | | | [fC][mC][fU][mG][fU][mU][fU][mU][mG][#] |
| | | | | [mC][#][mA][#][3XGalNAc] |
| 171 | 5 | P52-A28 | S | [mU][#][fA][#][mG][fA][mA][fU][mA][fA] |
| | | | | [mA][fU][mA][fU][mC][fU][#][mU][#][fC] |
| | | | | [#][mA][#][fA][#][rG][mG][#][fU][#][mA] |
| | | | | [fC][mU][fC][mC][fU][mU][fG][mU][mU][#] |
| | | | | [mG][#][mA][#][3XGalNac] |
| 172 | 6 | P52-A28 | AS | [mU][#][fC][#][mA][fA][mC][fA][mA][fG] |
| | | | | [mG][fA][mG][fU][mA][fC][#][mC][#][fC] |
| | | | | [#][mG][#][fG][#][rG][mA][#][fG][#][mA] |
| | | | | [fU][mA][fU][mU][fU][mA][fU][mU][mC][#] |
| | | | | [mU][#][mA][#][3XGalNac] |
| 111 | 7 | P52-A277 | S | [mU][#][fA][#][mG][fA][mA][fU][mA][fA] |
| | | | | [mA][fU][mA][fU][mC][fU][#][mU][@][fC] |
| | | | | [#][mA][#][fA][#][rG][mA][#][fC][#][mC] |
| | | | | [fU][mG][fC][mC][fU][mA][fU][mC][mC][#] |
| | | | | [mA][#][mA][#][3XGalNac] |
| 165 | 8 | P52-A277 | AS | [mU][#[fU][#][mG][fG][mA][fU][mA][fG] |
| | | | | [mG][fC][mA][fG][mG][fU][#][mG][#][fG] |
| | | | | [#][mA][#][fC][#][rU][mA][#][fG][#][mA] |
| | | | | [fU][mA][fU][mU][fU][mA][fU][mU][mC][#] |
| | | | | [mU][#][mA][#][3XGalNac] |
| 173 | 9 | P57-A277 | S | [mU][#][fC][#][mA][fA][mA][fA][mG][fC] |
| | | | | [mA][fA][mA][fA][mC][fA][#][mG][#][fG] |
| | | | | [#][mU][#][fC][#][rU][mA][#][fC][#][mC] |
| | | | | [fU][mG][fC][mC][fU][mA][fU][mC][mC][#] |
| | | | | [mA][#][mA][#][3XGalNac] |
| 174 | 10 | P57-A277 | AS | [mU][#][fU][#][mG][fG][mA][fU][mA][fG] |
| | | | | [mG][fC][mA][fG][mG][fU][#][mG][#][fG] |
| | | | | [#][mA][#][fC][#][rU][mU][#][fG][#][mU][fU] |
| | | | | [mU][fU][mG][fC][mU][fU][mU][mU][#] |
| | | | | [mG][#][mA][#][3XGalNac] |

TABLE 7b
GalNAc containing muRNAs for ApoC3-PCSK9 with 4 nucleotides in the bulge
region, where the corresponding strands “S + AS”, e.g., Construct ID Nos. 1 + 2, constitute
an muRNA construct. The denotation “(15)” in the muRNA name means that 15
nucleotides are on either side of the bulge within a contiguous strand.

| SEQ ID | Construct | | | |
|---|---|---|---|---|
| NO: | ID No. | muRNA | Strand | Sequence |
| 175 | 11 | P29- | S | [mU][#][fG][#][mC][fA][mA][fA][mA][fC][mA] |
| | | A28(15) | | [fG][mG][fU][mC][fU][#][mA][#][fG][#][mA][#] |
| | | | | [fA][#][rA][fG][#][mG][#][fU][mA][fC][mU][fC] |
| | | | | [mC][fU][mU][fG][mU][mU][#][mG][#][mA][#] |
| | | | | [3XGalNAc] |
| 176 | 12 | P29- | AS | [mU][#][fC][#][mA][fA][mC][fA][mA][fG][mG] |
| | | A28(15) | | [fA][mG][fU][mA][fC][#][mC][#][fC][#][mG][#] |
| | | | | [fG][#][rG][fU][#][mA][#][fG][mA][fC][mC][fU] |
| | | | | [mG][fU][mU][fU][mU][mG][#][mC][#][mA][#] |
| | | | | [3XGalNAc] |
| 177 | 13 | P29- | S | [mU][#][fG][#][mC][fA][mA][fA][mA][fC][mA] |
| | | A277(15) | | [fG][mG][fU][mC][fU][#][mA][#][fG][#][mA][#] |
| | | | | [fA][#][rA][fC][#][mA][#][fC][mC][fU][mG][fC] |
| | | | | [mC][fU][mA][fU][mC][mC][#][mA][#][mA][#] |
| | | | | [3XGalNac] |
| 178 | 14 | P29- | AS | [mU][#][fU][#][mG][fG][mA][fU][mA][fG][mG] |
| | | A277(15) | | [fC][mA][fG][mG][fU][#][mG][#][fG][#][mA][#] |
| | | | | [fC][#][rU][fU][#][mA][#][fG][mA][fC][mC][fU] |
| | | | | [mG][fU][mU][fU][mU][mG][#][mC][#][mA][#] |
| | | | | [3XGalNAc] |
| 179 | 15 | P52- | S | [mU][#][fA][#][mG][fA][mA][fU][mA][fA][mA] |
| | | A28(15) | | [fU][mA][fU][mC][fU][#][mU][#][fC][#][mA][#][fA] |
| | | | | [#][rG][fG][#][mG][#][fU][mA][fC][mU][fC][mC] |
| | | | | [fU][mU][fG][mU][mU][#][mG][#][mA][#] |
| | | | | [3XGalNAc] |
| 180 | 16 | P52- | AS | [mU][#][fC][#][mA][fA][mC][fA][mA][fG][mG] |
| | | A28(15) | | [fA][mG][fU][mA][fC][#][mC][#][fC][#][mG][#][fG] |
| | | | | [#][rG][fA][#][mA][#][fG][mA][fU][mA][fU][mU] |
| | | | | [fU][mA][fU][mU][mC][#][mU][#][mA][#] |
| | | | | [3XGalNac] |
| 181 | 17 | P52- | S | [mU][#][fA][#][mG][fA][mA][fU][mA][fA][mA][fU] |
| | | A277(15) | | [mA][fU][mC][fU][#][mU][#][fC][#][mA][#][fA] |
| | | | | [#][rG][fC][#][mA][#][fC][mC][fU][mG][fC][mC] |
| | | | | [fU][mA][fU][mC][mC][#][mA][#][mA][#] |
| | | | | [3XGalNac] |
| 182 | 18 | P52- | AS | [mU][#][fU][#][mG][fG][mA][fU][mA][fG][mG] |
| | | A277(15) | | [fC][mA][fG][mG][fU][#][mG][#][fG][#][mA][#][fC] |
| | | | | [#][rU][fA][#][mA][#][fG][mA][fU][mA][fU][mU] |
| | | | | [fU][mA][fU][mU][mC][#][mU][#][mA][#] |
| | | | | [3XGalNac] |
| 183 | 19 | P44- | S | [mU][#][fC][#][mU][fU][mC][fA][mA][fG][mU] |
| | | | | [fU][mA][fC][mA][fA][#][mA][#][mA][#][fG][#] |
| | | A28(15) | | [mC][#][rA][fG][#][mG][#][fU][mA][fC][mU][fC] |
| | | | | [mC][fU][mU][fG][mU][mU ][#][mG][#][mA][#] |
| | | | | [3XGalNac] |
| 184 | 20 | p44- | AS | [mU][#][fC][#][mA][fA][mC][fA][mA][fG][mG] |
| | | A28(15) | | [fA][mG][fU][mA][fC][#][mC][#][fC][#][mG][#][fG] |
| | | | | [#][rG][fU][#][mU][#][fU][mG][fU][mA][fA][mC] |
| | | | | [fU][mU][fG][mA][mA][#][mG][#][mA][#] |
| | | | | [3XGalNac] |

[0313] APOC3/PCSK9 Combo—Screen:

[0314] On the day of transfection, primary human hepatocytes were thawed in 45 mL of human OptiThaw (Sekisui XenoTech, K8000) and centrifuged down at 200 g for 5 minutes. Cells were resuspended in 2× complete WEM and counted. Cells were then plated in 50 μL of 2× complete WEM at 25,000 cells per well on 96 well type 1 rat tail Collagen plates and allowed to rest and attach for four hours before transfection. After rest, the compounds were diluted further to 2 μM in basal WEM. A seven step, five fold dilution series was prepared in basal WEM from 2 μM to 0.000128 μM 50 μL of each 2 μM compound was added to respective triplicates of the plated hepatocytes for a final concentration of 1 μM down to 0.000064 μM in a volume of 100 uL 1× complete WEM.

[0315] 72 hours post transfection, cells were harvested and RNA isolated using the PureLink Pro 96 total RNA Purification Kit (ThermoFisher, 12173011A) according to the manufacturer protocol. Harvested RNA was assayed for both PCSK9 and APOC3 expression via Taqman qPCR using the Luna Universal Probe One-Step RT-qPCR Kit (NEB, E3006). Two separate qPCR assays were performed for each sample using an either an APOC3 Taqman probe (Hs00906501_g1-FAM) or PCSK9 probe (Hs00906501_g1-FAM) multiplexed with a common GAPDH VIC probe (ThermoFisher, 4326317E). Thermocycling and data acquisition was performed with an Applied Biosystems QuantStudio 3 Real-Time PCR System. FIGS. 1a, 1c, and 1e show the dose-response inhibition of PCSK9 mRNA and FIGS. 1b, 1d, and 1f show the dose-response inhibition of APOC3 mRNA

### Example 3

[0316] muRNA (APOC3/PCSK9 combination) Leads for Candidate Screening Study in Male UPA HUMANIZED LIVER MICE Mice, non-GLP

[0317] 1. Study Objective(s)

[0318] The objective of this non-GLP study is to:
[0319] (i) Evaluate the utility of humanized liver UPA HUMANIZED LIVER MICE mouse model to study performance of muRNA (dual-targeting combination) GalNAc-siRNA molecules.
[0320] (ii) Evaluate a dose response effect of three selected muRNA leads for candidate GalNAc-siRNA constructs (with 15 Configuration) targeting APOC3 and PCSK9 using the humanized liver UPA HUMANIZED LIVER MICE mouse model by subcutaneous administration and after 14-day survival.

[0321] At necropsy, 3 liver biopsies per animal will be preserved in separate vials in RNAlater, flash frozen, and stored at −80° C. Three more liver biopsies will be taken, flash frozen in the same vial, and stored at −80° C. Harvested tissue will be flash frozen and stored at −80° C. Harvested tissues are heart, lung, spleen, rest of liver, right kidney, and left kidney. Humanized liver mice strain is UPA HUMANIZED LIVER MICE.

[0322] 2. Study Schedule
[0323] 2.1. Animal Receipt Date: Sep. 29, 2021
[0324] 2.2. Acclimatization/Quarantine End Date: 5 days
[0325] 2.3. Baseline Procedure Date: No baseline procedures
[0326] 2.4. Procedure Start Day 0 Date: Tentative: October

[0327] Waiting on test material.
[0328] 2.5. Necropsy Start: On Day 14 post treatment.
[0329] 2.6. In-Life Study Completion: 14 days post treatment
[0330] 2.7. Preliminary Report: None required by Sponsor, Data only
[0331] 2.8. Final Report Issued: None required

[0332] 3. Test System Information
[0333] 3.1. Animal Test
   [0334] 3.1.1. Common Name: Mouse
   [0335] 3.1.2. Breed/Class: Rodent—uPA humanized liver Mouse
   [0336] 3.1.3. Number of Animals (by gender): 36 Male, all naïve
   [0337] 3.1.4. Age Range: 14-19 weeks
   [0338] 3.1.5. Weight Range: Approx. 20 grams
[0339] 3.2. Acclimation Period:
   [0340] 3.2.1. Duration:

[0341] All animals will be acclimated for a minimum period of five (5) days prior to release by the Attending veterinarian, at which time the overall health of the animals will be evaluated. Animals which are not released from acclimation will be treated accordingly and further evaluation will be performed prior to release. All records from the acclimation period will remain in the study file.

[0342] 4. Study Design
[0343] 4.1. Design Details

[0344] This study will have one type of mice, 35 uPA humanized liver mice. Animals will be grouped by treatment type and dosage. Each animal will be treated by subcutaneous injection of test material. (Note: that the injection must be given subcutaneously. The test articles will not be functional if the subcutaneous site is missed, and injection is given within the muscular region or test articles are injected into the vein/bloodstream). Group 1 will have five animals receive a control dose of PBS. Groups 2-7 will receive one dose (10 or 30 mg/kg) with five animals for each dose amount. See study table 1 for details. All animals will be survived for 14 days. At pre-euthanasia, plasma and serum will be collected from all animals, flash frozen and stored at −80° C. At necropsy, two 2 mm biopsy punches will be taken from each site: left, middle and right liver lobes (total 6 biopsies). Three biopsy samples, one from each liver lobe, will be soaked in RNAlater for 15 minutes, flash frozen and stored at −80° C. The remaining three liver biopsies will be placed into one vial, flash frozen and stored at −80° C. All other tissue samples, heart, lung, spleen, rest of liver, right kidney, and left kidney will be flash frozen and stored at −80° C.

TABLE 8
Study Table

| | Number of | | | | Pre- |
|---|---|---|---|---|---|
| | UPA | Treatment | | | Euthanasia |
| | HUMANIZED | Subcutaneous | | Blood | And |
| | LIVER MICE | Injection | Dose | Draw(Day | Necropsy(Day |
| Group | Animals | (Day 0) | mg/kg | 14) | 14) |
| 1 | 5 | PBS | — | Plasma | Pre- |
| 2 | 5 | P29-A28 | 10 | and serum | Euthanasia: |
| | | (15 Config) | | will be | Plasma and |
| 3 | 5 | P29-A28 | 30 | collected | serum |
| | | (15 Config) | | at pre- | collection. |
| 4 | 5 | P29-A277 | 10 | euthanasia | Necropsy: |
| | | (15 Config) | | (Day 14). | 2 mm biopsy |
| 5 | 5 | P29-A277 | 30 | Send | of left, middle |
| | | (15 Config) | | plasma | and right liver |
| | | | | and serum | lobes in |
| | | | | to | separate vials, |
| | | | | Sponsor. | in RNAlater |
| | | | | | for 15 min, |
| | | | | | flash freeze |
| | | | | | and store at |
| | | | | | −80° C. |
| | | | | | 2 mm biopsy |
| | | | | | of left, middle |
| | | | | | and right liver |
| | | | | | all in one vial, |
| | | | | | flash freeze |
| | | | | | and store at |
| | | | | | −80° C. |
| | | | | | Samples of |
| | | | | | heart, lung, |
| | | | | | spleen, rest of |
| | | | | | liver, right |
| | | | | | kidney, and |
| | | | | | left kidney, |
| | | | | | flash freeze |
| | | | | | and store at |
| | | | | | −80° C. |

[0345] 4.2. Route of Administration

[0346] Subcutaneous injection in the scruff. An injection volume of 200 uL.

[0347] (Note: that the injection must be given subcutaneously. The test articles will not be functional if the subcutaneous site is missed, and injection is given within the muscular region or test articles are injected into the vein/bloodstream).
[0348] 4.3. Baseline data collected prior to initiating study.

[0349] none

[0350] 5. Test Article and Ancillary Material Information
[0351] 5.1. Test Drug 1:
   [0352] 5.1.1. Identification: P29-A28 (15 Configuration) (see Table 7b)
   [0353] 5.1.2. Manufacturer: Sirnaomics
   [0354] 5.1.3. Description: GalNAc-siRNA targeting APOC3 and PCSK9
   [0355] 5.1.4. Lot/Batch Number: Will be recorded on study materials form.
   [0356] 5.1.5. Expiration Date: Will be recorded on study materials form.
   [0357] 5.1.6. Storage Temperature: Ambient
   [0358] 5.1.7. Bio-Hazard Status: None
   [0359] 5.1.8. MSDS*: TBD
   [0360] 5.1.9. Appearance: Clear Liquid
   [0361] 5.1.10. Dose Information: See Table 8
   [0362] 5.1.11. Residual Test Article Storage: None
[0363] 5.2. Test Drug 2:
   [0364] 5.2.1. Identification: P29-A277 (15 Configuration) (see Table 7b)
   [0365] 5.2.2. Manufacturer: Sirnaomics
   [0366] 5.2.3. Description: GalNAc-siRNA targeting APOC3 and PCSK9
   [0367] 5.2.4. Lot/Batch Number: Will be recorded on study materials form.
   [0368] 5.2.5. Expiration Date: Will be recorded on study materials form.
   [0369] 5.2.6. Storage Temperature: Ambient
   [0370] 5.2.7. Bio-Hazard Status: None
   [0371] 5.2.8. MSDS*: TBD
   [0372] 5.2.9. Appearance: Clear Liquid
   [0373] 5.2.10. Dose Information: See Table 8
   [0374] 5.2.11. Residual Test Article Storage: None

[0375] 6. Necropsy and Explant Procedure:

[0376] Note: Tissue samples will be taken using separate tools for each individual collection. Tissue harvesting tools will be changed for each tissue sample to prevent cross contamination.

[0377] A 2 mm biopsy punch will be taken from the left, middle and right liver lobes. Place biopsy samples into separate 2 ml Eppendorf tubes, with 1.5 ml RNAlater and let soak for 15 minutes, flash freeze then store at −80° C. Three more 2 mm biopsy samples will be taken of the left, middle and right liver lobes all placed together into one 2 ml Eppendorf tubes, flash freeze then store at −80° C. Collected tissue samples: heart, lung, spleen, rest of liver, right kidney, and left kidney will be flash frozen in liquid nitrogen.

[0378] The study results are shown in FIGS. 2a and 2b.

1. A nucleic acid construct comprising at least:
(a) a first nucleic acid portion that is at least partially complementary to at least a first portion of an RNA which is transcribed from a PCSK9 gene;
(b) a second nucleic acid portion that is at least partially complementary to at least a second portion of an RNA which is transcribed from a APOC3 gene;
(c) a third nucleic acid portion that is at least partially complementary to said first nucleic acid portion of (a), so as to form a first nucleic acid duplex region therewith;
(d) a fourth nucleic acid portion that is at least partially complementary to said second nucleic acid portion of (b), so as to form a second nucleic acid duplex region therewith; and wherein the construct
further comprises at least one labile functionality such that subsequent to in vivo administration said construct is cleaved so as to yield at least first and second discrete nucleic acid targeting molecules; and
wherein said labile functionality comprises one or more unmodified nucleotides.

2. The construct according to claim 1, wherein
(a) said first nucleic acid portion has a nucleobase sequence selected from the group consisting of SEQ ID NOs: 1 to 7 and SEQ ID NO: 31;
(b) said second nucleic acid portion has a nucleobase sequence selected from the group consisting of SEQ ID NOs: 8 to 14 and SEQ ID NO: 29;
(c) said third nucleic acid portion has a nucleobase sequence selected from the group consisting of SEQ ID NOs: 15 to 21 and SEQ ID NO: 32; and/or
(d) said fourth nucleic acid portion has a nucleobase sequence selected from the group consisting of SEQ ID NOs: 22 to 28 and SEQ ID NO: 30.

3. The construct according to claim 1, wherein said first nucleic acid portion of (a) is linked to said fourth nucleic acid portion of (d) as a primary structure.

4. The construct according to claim 2, wherein said first and said fourth nucleic acid portions have the nucleobase sequences selected from the group consisting of SEQ ID NOs: 2 and 22; 4 and 24; 5 and 22; 6 and 24; 4 and 22; 6 and 22; 31 and 24; 31 and 22; 4 and 25; 5 and 26; 3 and 28; and 1 and 30.

5. The construct according to claim 2, wherein said second nucleic acid portion of (b) is linked to said third nucleic acid portion of (c) as a primary structure.

6. The construct according to claim 2, wherein said second and third nucleic acid portions have the nucleobase sequences selected from the group consisting of SEQ ID NOs: 8 and 16; 10 and 18; 8 and 19; 10 and 20; 8 and 18; 8 and 20; 10 and 32; 8 and 32; 11 and 18; 12 and 19; 14 and 17; and 29 and 15.

7. The construct according to claim 1, further comprising 1 to 8 additional nucleic acid portions that are respectively at least partially complementary to an additional 1 to 8 portions of RNA transcribed from one or more target genes, and wherein each of the 1 to 8 additional nucleic acid portions respectively form additional duplex regions with respective passenger nucleic acid portions.

8. The construct according to claim 7, wherein said second nucleic acid portion of (b), and said 1 to 8 additional nucleic acid portions, are linked to selected passenger nucleic acid portions as respective primary structures.

9. The construct according to claim 3, wherein said linking represents either (i) an internucleotide bond, (ii) an internucleotide nick, or (iii) a nucleic acid linker portion of 1, 2, 3, 4, 5, 6, 7, 8, 9, or 10 nucleotides, said nucleic acid linker optionally being single stranded.

10. The construct according to claim 9, wherein said internucleotide bond involves at least one of said one or more unmodified nucleotides, wherein optionally cleavage occurs at the 3′ position of (at least one of) said unmodified nucleotide(s).

11. The construct according to claim 1, wherein said first nucleic acid portion of (a), and/or said second nucleic acid portion of (b), and/or said third nucleic acid portion of (c), and/or said fourth nucleic acid portion of (d), are respectively 7 to 25 nucleotides in length, wherein said first nucleic acid portion of (a) and/or said second nucleic acid portion of (b) have a length of 18 to 21, more optionally 18 or 19, and yet more optionally 19 nucleotides, and wherein said third nucleic acid portion of (c), and/or said fourth nucleic acid portion of (d) have a length of 11 to 20, more optionally 13 to 16, and yet more optionally 14 or 15, most optionally 15 nucleotides.

12. The construct according to claim 11, wherein said unmodified nucleotide(s) is/are at any of position 18 to 25, more optionally at any of positions 18 to 21, and most optionally at position 19 and/or the 3′ terminal position of said first nucleic acid portion of (a) and/or of said third nucleic acid portion of (c).

13. The construct according to claim 12, wherein said nucleic acid linker portion is 1 to 8 nucleotides in length, optionally 2 to 7 or 3 to 6 nucleotides in length, more optionally about 4 or 5 and most optionally 4 nucleotides in length, and wherein the construct
further comprises one or more phosphorothioate or phosphorodithioate internucleotide linkages, wherein the.
one or more phosphorothioate or phosphorodithioate internucleotide linkages are located at one or more of the 5′ and/or 3′ regions of said first nucleic acid portion of (a), and/or said second nucleic acid portion of (b), and/or said third nucleic acid portion of (c), and/or said fourth nucleic acid portion of (d), and/or said 1 to 8 additional nucleic acid portions, and/or said passenger nucleic acid portions.

14. The construct according to claim 13 which comprises phosphorothioate or phosphorodithioate internucleotide linkages between at least two adjacent nucleotides of the nucleic acid linker portion, and optionally,
between each adjacent nucleotide that is present in said nucleic acid linker portion.

15. The construct according to any of claim 14, which comprises a phosphorothioate or phosphorodithioate internucleotide linkage linking:
the first nucleic acid portion of (a) to the nucleic acid linker portion; and/or
the second nucleic acid portion of (b) to the nucleic acid linker portion; and/or
the third nucleic acid portion of (c) to the nucleic acid linker portion; and/or
the fourth nucleic acid portion of (d) to the nucleic acid linker portion; and/or
the 1 to 8 additional nucleic acid portions to the nucleic acid linker portion; and/or
the passenger nucleic acid portions to the nucleic acid linker portion.

16. The construct according to claim 1, wherein at least one nucleotide of at least one of the following is modified:
the first nucleic acid portion of (a); and/or
the second nucleic acid portion of (b); and/or
the third nucleic acid portion of (c); and/or
the fourth nucleic acid portion of (d); and/or
to the extent present, the 1 to 8 additional nucleic acid portions; and/or
to the extent present, the passenger nucleic acid portions; and/or
to the extent present, the nucleic acid linker portion.

17. The construct according to claim 16, wherein the modification and/or modifications are individually a sugar, a phosphate, or a base modifications.

18. The construct according to claim 17, where the modification is selected from nucleotides with 2′ modified sugars; conformationally restricted nucleotides (CRN) sugar such as locked nucleic acid (LNA), (S)-constrained ethyl bicyclic nucleic acid, and constrained ethyl (cEt), tricyclo-DNA; morpholino, unlocked nucleic acid (UNA), glycol nucleic acid (GNA), D-hexitol nucleic acid (HNA), and cyclohexene nucleic acid (CeNA), wherein optionally said 2′ modified sugar is selected from 2′-O-alkyl modified sugar, 2′-O-methyl modified sugar, 2′-O-methoxyethyl modified sugar, 2′-O-allyl modified sugar, 2′-C-allyl modified sugar, 2′-deoxy modified sugar such as 2′-deoxy ribose, 2′-F modified sugar, 2′-arabino-fluoro modified sugar, 2′-O-benzyl modified sugar, 2′-amino modified sugar, and 2′-O-methyl-4-pyridine modified sugar.

19. The construct according to claim 18, wherein at least one modification is a 2′-O-methyl modification in a ribose moiety and/or, wherein at least one modification is a 2′-F modification in a ribose moiety.

20. The construct of claim 1, wherein
(a) said first nucleic acid portion is selected from the group consisting of SEQ ID Nos. 33-39;
(b) said second nucleic acid portion is selected from the group consisting of SEQ ID Nos. 40-46;
(c) said third nucleic acid portion is selected from the group consisting of SEQ ID Nos. SEQ ID Nos. 47-53; and/or
(d) said fourth nucleic acid portion is selected from the group consisting of SEQ ID Nos. SEQ ID Nos. 54-60.

21. The construct of claim 1, wherein said construct comprises two strands, wherein the first strand is selected from the group consisting of SEQ ID Nos. 61-114 and the second strand the group consisting of SEQ ID Nos. 115-168; or
said first and second strands are selected from the group consisting of SEQ ID Nos. 110-111, 164-165, and 169-174; or
said first and second strands are selected from the group consisting of SEQ ID Nos. 175-184.

22. The construct of claim 21, wherein the first strand is selected from the group consisting of SEQ ID Nos. 62, 78, 65, 80, 110 to 114, 85, 93, 105, and wherein the second strand is selected from the group consisting of SEQ ID Nos. 116, 132, 119, 134, 164 to 168, 139, 147, and 159.

23. A pharmaceutical composition comprising a construct according to claim 1 and further comprising a physiologically acceptable excipient, diluent, antioxidant, and/or preservative.

24. The pharmaceutical composition of claim 23, wherein said construct is the only pharmaceutically active agent.

25. The pharmaceutical composition of claim 23, wherein said pharmaceutical composition furthermore comprises one or more further pharmaceutically active agents.

26. The pharmaceutical composition of claim 25, wherein said further pharmaceutically active agent(s) comprise an RNAi agent which is directed to a target different from PCSK9 and from APOC3; and/or wherein said agent(s) comprise a lipid-lowering agent distinct from said construct, wherein said lipid-lowering agent is optionally ezetimib; Vascepa; Vupanorsen; statins such as Rosuvastatin and Simvastatin; and/or fibrates such fenofibrate.

27. A method of treating a subject to ameliorate or prevent a disease or disorder comprising: administering to the subject a therapeutically effective amount of the pharmaceutical composition of claim 23, wherein the disease or disorder is a PCSK9 and/or an APOC3-associated disease or disorder, or a disease or disorder requiring a reduction of PCSK9 and/or APOC3 gene expression levels.

28. The method of claim 27, wherein the composition is administered to a subject who is statin-intolerant, or for whom statins are contraindicated.

29. The method of claim 28, wherein said disease or disorder treated comprises:
(a) a PCSK9-associated disease or disorder, or a disease or disorder requiring reduction of low-density lipoprotein (LDL) cholesterol, said disease or disorder optionally being selected from dyslipidemia including mixed dyslipidemia, hypercholesterolemia, heterozygous familial hypercholesterolemia, non-familial hypercholesterolemia; atherosclerosis; and atherosclerotic cardiovascular disease (ASCVD) including myocardial infarction, stroke and peripheral arterial disease;
and/or
(b) an APOC3-associated disease or disorder, or a disease or disorder requiring reduction of APOC3 expression levels, said disease or disorder optionally being selected from dyslipidemia including mixed dyslipidemia; hyperchylomicronemia including familial hyperchylomicronemia; hypertriglyceridemia, optionally severe hypertriglyceridemia and/or hypertriglyceridemia with blood triglyceride levels above 500 mg/dl; inflammation including low-grade inflammation; atherosclerosis; atherosclerotic cardiovascular diseases (ASCVD) including major adverse cardiovascular events (MACE) such as myocardial infarction, stroke and peripheral arterial disease; and pancreatitis including acute pancreatitis.

30. The method of claim 29, wherein the subject is a human.

The application's sequence listing, which the Patent Office published only in electronic form, follows.

SEQUENCE LISTING (184 sequences)

SEQ ID NO: 1 - RNA, 19 nt, synthetic construct
  source 1..19: mol_type = other RNA; note = Artificial Sequence
tcttcaagttacaaaagca

SEQ ID NO: 2 - RNA, 19 nt, synthetic construct
  source 1..19: mol_type = other RNA; note = Artificial Sequence
taaaagcaaaacaggtcta

SEQ ID NO: 3 - RNA, 19 nt, synthetic construct
  source 1..19: mol_type = other RNA; note = Artificial Sequence
tacaaaagcaaaacaggtc

SEQ ID NO: 4 - RNA, 19 nt, synthetic construct
  source 1..19: mol_type = other RNA; note = Artificial Sequence
tgcaaaacaggtctagaaa

SEQ ID NO: 5 - RNA, 19 nt, synthetic construct
  source 1..19: mol_type = other RNA; note = Artificial Sequence
tcaaaagcaaaacaggtct

SEQ ID NO: 6 - RNA, 19 nt, synthetic construct
  source 1..19: mol_type = other RNA; note = Artificial Sequence
tagaataaatatcttcaag

SEQ ID NO: 7 - RNA, 19 nt, synthetic construct
  source 1..19: mol_type = other RNA; note = Artificial Sequence
taaagcaaaacaggtctag

SEQ ID NO: 8 - RNA, 19 nt, synthetic construct
  source 1..19: mol_type = other RNA; note = Artificial Sequence
ttggataggcaggtggact

SEQ ID NO: 9 - RNA, 19 nt, synthetic construct
  source 1..19: mol_type = other RNA; note = Artificial Sequence
tgcactgagaatactgtcc

SEQ ID NO: 10 - RNA, 19 nt, synthetic construct
  source 1..19: mol_type = other RNA; note = Artificial Sequence
tcaacaaggagtacccggg

SEQ ID NO: 11 - RNA, 19 nt, synthetic construct
  source 1..19: mol_type = other RNA; note = Artificial Sequence
tcttgtccagctttattgg

SEQ ID NO: 12 - RNA, 19 nt, synthetic construct
  source 1..19: mol_type = other RNA; note = Artificial Sequence
ttccagctttattgggagg

SEQ ID NO: 13 - RNA, 19 nt, synthetic construct
  source 1..19: mol_type = other RNA; note = Artificial Sequence
tgtccagctttattgggag

SEQ ID NO: 14 - RNA, 19 nt, synthetic construct
  source 1..19: mol_type = other RNA; note = Artificial Sequence
tcactgagaatactgtccc

SEQ ID NO: 15 - RNA, 15 nt, synthetic construct
  source 1..15: mol_type = other RNA; note = Artificial Sequence
tttgtaacttgaaga

SEQ ID NO: 16 - RNA, 15 nt, synthetic construct
  source 1..15: mol_type = other RNA; note = Artificial Sequence
cctgttttgctttta

SEQ ID NO: 17 - RNA, 15 nt, synthetic construct
  source 1..15: mol_type = other RNA; note = Artificial Sequence
tgttttgcttttgta

SEQ ID NO: 18 - RNA, 15 nt, synthetic construct
  source 1..15: mol_type = other RNA; note = Artificial Sequence
tagacctgttttgca

SEQ ID NO: 19 - RNA, 15 nt, synthetic construct
  source 1..15: mol_type = other RNA; note = Artificial Sequence
ctgttttgcttttga

SEQ ID NO: 20 - RNA, 15 nt, synthetic construct
  source 1..15: mol_type = other RNA; note = Artificial Sequence
aagatatttattcta

SEQ ID NO: 21 - RNA, 15 nt, synthetic construct
  source 1..15: mol_type = other RNA; note = Artificial Sequence
acctgttttgcttta

SEQ ID NO: 22 - RNA, 15 nt, synthetic construct
  source 1..15: mol_type = other RNA; note = Artificial Sequence
cacctgcctatccaa

SEQ ID NO: 23 - RNA, 15 nt, synthetic construct
  source 1..15: mol_type = other RNA; note = Artificial Sequence
agtattctcagtgca

SEQ ID NO: 24 - RNA, 15 nt, synthetic construct
  source 1..15: mol_type = other RNA; note = Artificial Sequence
ggtactccttgttga

SEQ ID NO: 25 - RNA, 15 nt, synthetic construct
  source 1..15: mol_type = other RNA; note = Artificial Sequence
taaagctggacaaga

SEQ ID NO: 26 - RNA, 15 nt, synthetic construct
  source 1..15: mol_type = other RNA; note = Artificial Sequence
ccaataaagctggaa

SEQ ID NO: 27 - RNA, 15 nt, synthetic construct
  source 1..15: mol_type = other RNA; note = Artificial Sequence
caataaagctggaca

SEQ ID NO: 28 - RNA, 15 nt, synthetic construct
  source 1..15: mol_type = other RNA; note = Artificial Sequence
cagtattctcagtga

SEQ ID NO: 29 - RNA, 19 nt, synthetic construct
  source 1..19: mol_type = other RNA; note = Artificial Sequence
tgcactgagaatactgtcc

SEQ ID NO: 30 - RNA, 14 nt, synthetic construct
  source 1..14: mol_type = other RNA; note = Artificial Sequence
gtattctcagtgca

SEQ ID NO: 31 - RNA, 19 nt, synthetic construct
  source 1..19: mol_type = other RNA; note = Artificial Sequence
tgtgacacaaagcaggtgc

SEQ ID NO: 32 - RNA, 14 nt, synthetic construct
  source 1..14: mol_type = other RNA; note = Artificial Sequence
tgctttgtgtcaca

SEQ ID NO: 33 - RNA, 19 nt, synthetic construct
  source 1..19: mol_type = other RNA
  modified_base 1: mod_base = OTHER; note = Phosphate 2'-O-methyluridine, wherein phosphate may be absent
  modified_base 2: mod_base = OTHER; note = 2'-fluorocytidine
  modified_base 3: mod_base = OTHER; note = 2'-O-methyluridine
  modified_base 4: mod_base = OTHER; note = 2'-fluorouridine
  modified_base 5: mod_base = OTHER; note = 2'-O-methylcytidine
  modified_base 6: mod_base = OTHER; note = 2'-fluoroadenosine
  modified_base 7: mod_base = OTHER; note = 2'-O-methyladenosine
  modified_base 8: mod_base = OTHER; note = 2'-fluoroguanosine
  modified_base 9: mod_base = OTHER; note = 2'-O-methyluridine
  modified_base 10: mod_base = OTHER; note = 2'-fluorouridine
  modified_base 11: mod_base = OTHER; note = 2'-O-methyladenosine
  modified_base 12: mod_base = OTHER; note = 2'-fluorocytidine
  modified_base 13: mod_base = OTHER; note = 2'-O-methyladenosine
  modified_base 14: mod_base = OTHER; note = 2'-fluoroadenosine
  modified_base 15: mod_base = OTHER; note = 2'-O-methyladenosine
  modified_base 16: mod_base = OTHER; note = 2'-fluoroadenosine
  modified_base 17: mod_base = OTHER; note = 2'-O-methylguanosine
  modified_base 18: mod_base = OTHER; note = 2'-fluorocytidine
  modified_base 19: mod_base = OTHER; note = 2'-O-methyladenosine
tcttcaagttacaaaagca

SEQ ID NO: 34 - RNA, 19 nt, synthetic construct
  source 1..19: mol_type = other RNA
  modified_base 1: mod_base = OTHER; note = Phosphate 2'-O-methyluridine, wherein phosphate may be absent
  modified_base 2: mod_base = OTHER; note = 2'-fluoroadenosine
  modified_base 3: mod_base = OTHER; note = 2'-O-methyladenosine
  modified_base 4: mod_base = OTHER; note = 2'-fluoroadenosine
  modified_base 5: mod_base = OTHER; note = 2'-O-methyladenosine
  modified_base 6: mod_base = OTHER; note = 2'-fluoroguanosine
  modified_base 7: mod_base = OTHER; note = 2'-O-methylcytidine
  modified_base 8: mod_base = OTHER; note = 2'-fluoroadenosine
  modified_base 9: mod_base = OTHER; note = 2'-O-methyladenosine
  modified_base 10: mod_base = OTHER; note = 2'-fluoroadenosine
  modified_base 11: mod_base = OTHER; note = 2'-O-methyladenosine
  modified_base 12: mod_base = OTHER; note = 2'-fluorocytidine
  modified_base 13: mod_base = OTHER; note = 2'-O-methyladenosine
  modified_base 14: mod_base = OTHER; note = 2'-fluoroguanosine
  modified_base 15: mod_base = OTHER; note = 2'-O-methylguanosine
  modified_base 16: mod_base = OTHER; note = 2'-fluorouridine
  modified_base 17: mod_base = OTHER; note = 2'-O-methylcytidine
  modified_base 18: mod_base = OTHER; note = 2'-fluorouridine
  modified_base 19: mod_base = OTHER; note = 2'-O-methyladenosine
taaaagcaaaacaggtcta

SEQ ID NO: 35 - RNA, 19 nt, synthetic construct
  source 1..19: mol_type = other RNA
  modified_base 1: mod_base = OTHER; note = Phosphate 2'-O-methyluridine, wherein phosphate may be absent
  modified_base 2: mod_base = OTHER; note = 2'-fluoroadenosine
  modified_base 3: mod_base = OTHER; note = 2'-O-methylcytidine
  modified_base 4: mod_base = OTHER; note = 2'-fluoroadenosine
  modified_base 5: mod_base = OTHER; note = 2'-O-methyladenosine
  modified_base 6: mod_base = OTHER; note = 2'-fluoroadenosine
  modified_base 7: mod_base = OTHER; note = 2'-O-methyladenosine
  modified_base 8: mod_base = OTHER; note = 2'-fluoroguanosine
  modified_base 9: mod_base = OTHER; note = 2'-O-methylcytidine
  modified_base 10: mod_base = OTHER; note = 2'-fluoroadenosine
  modified_base 11: mod_base = OTHER; note = 2'-O-methyladenosine
  modified_base 12: mod_base = OTHER; note = 2'-fluoroadenosine
  modified_base 13: mod_base = OTHER; note = 2'-O-methyladenosine
  modified_base 14: mod_base = OTHER; note = 2'-fluorocytidine
  modified_base 15: mod_base = OTHER; note = 2'-O-methyladenosine
  modified_base 16: mod_base = OTHER; note = 2'-fluoroguanosine
  modified_base 17: mod_base = OTHER; note = 2'-O-methylguanosine
  modified_base 18: mod_base = OTHER; note = 2'-fluorouridine
  modified_base 19: mod_base = OTHER; note = 2'-O-methylcytidine
tacaaaagcaaaacaggtc

SEQ ID NO: 36 - RNA, 19 nt, synthetic construct
  source 1..19: mol_type = other RNA
  modified_base 1: mod_base = OTHER; note = Phosphate 2'-O-methyluridine, wherein phosphate may be absent
  modified_base 2: mod_base = OTHER; note = 2'-fluoroguanosine
  modified_base 3: mod_base = OTHER; note = 2'-O-methylcytidine
  modified_base 4: mod_base = OTHER; note = 2'-fluoroadenosine
  modified_base 5: mod_base = OTHER; note = 2'-O-methyladenosine
  modified_base 6: mod_base = OTHER; note = 2'-fluoroadenosine
  modified_base 7: mod_base = OTHER; note = 2'-O-methyladenosine
  modified_base 8: mod_base = OTHER; note = 2'-fluorocytidine
  modified_base 9: mod_base = OTHER; note = 2'-O-methyladenosine
  modified_base 10: mod_base = OTHER; note = 2'-fluoroguanosine
  modified_base 11: mod_base = OTHER; note = 2'-O-methylguanosine
  modified_base 12: mod_base = OTHER; note = 2'-fluorouridine
  modified_base 13: mod_base = OTHER; note = 2'-O-methylcytidine
  modified_base 14: mod_base = OTHER; note = 2'-fluorouridine
  modified_base 15: mod_base = OTHER; note = 2'-O-methyladenosine
  modified_base 16: mod_base = OTHER; note = 2'-fluoroguanosine
  modified_base 17: mod_base = OTHER; note = 2'-O-methyladenosine
  modified_base 18: mod_base = OTHER; note = 2'-fluoroadenosine
  modified_base 19: mod_base = OTHER; note = 2'-O-methyladenosine
tgcaaaacaggtctagaaa

SEQ ID NO: 37 - RNA, 19 nt, synthetic construct
  source 1..19: mol_type = other RNA
  modified_base 1: mod_base = OTHER; note = Phosphate 2'-O-methyluridine, wherein phosphate may be absent
  modified_base 2: mod_base = OTHER; note = 2'-fluorocytidine
  modified_base 3: mod_base = OTHER; note = 2'-O-methyladenosine
  modified_base 4: mod_base = OTHER; note = 2'-fluoroadenosine
  modified_base 5: mod_base = OTHER; note = 2'-O-methyladenosine
  modified_base 6: mod_base = OTHER; note = 2'-fluoroadenosine
  modified_base 7: mod_base = OTHER; note = 2'-O-methylguanosine
  modified_base 8: mod_base = OTHER; note = 2'-fluorocytidine
  modified_base 9: mod_base = OTHER; note = 2'-O-methyladenosine
  modified_base 10: mod_base = OTHER; note = 2'-fluoroadenosine
  modified_base 11: mod_base = OTHER; note = 2'-O-methyladenosine
  modified_base 12: mod_base = OTHER; note = 2'-fluoroadenosine
  modified_base 13: mod_base = OTHER; note = 2'-O-methylcytidine
  modified_base 14: mod_base = OTHER; note = 2'-fluoroadenosine
  modified_base 15: mod_base = OTHER; note = 2'-O-methylguanosine
  modified_base 16: mod_base = OTHER; note = 2'-fluoroguanosine
  modified_base 17: mod_base = OTHER; note = 2'-O-methyluridine
  modified_base 18: mod_base = OTHER; note = 2'-fluorocytidine
  modified_base 19: mod_base = OTHER; note = 2'-O-methyluridine
tcaaaagcaaaacaggtct

SEQ ID NO: 38 - RNA, 19 nt, synthetic construct
  source 1..19: mol_type = other RNA
  modified_base 1: mod_base = OTHER; note = Phosphate 2'-O-methyluridine, wherein phosphate may be absent
  modified_base 2: mod_base = OTHER; note = 2'-fluoroadenosine
  modified_base 3: mod_base = OTHER; note = 2'-O-methylguanosine
  modified_base 4: mod_base = OTHER; note = 2'-fluoroadenosine
  modified_base 5: mod_base = OTHER; note = 2'-O-methyladenosine
  modified_base 6: mod_base = OTHER; note = 2'-fluorouridine
  modified_base 7: mod_base = OTHER; note = 2'-O-methyladenosine
  modified_base 8: mod_base = OTHER; note = 2'-fluoroadenosine
  modified_base 9: mod_base = OTHER; note = 2'-O-methyladenosine
  modified_base 10: mod_base = OTHER; note = 2'-fluorouridine
  modified_base 11: mod_base = OTHER; note = 2'-O-methyladenosine
  modified_base 12: mod_base = OTHER; note = 2'-fluorouridine
  modified_base 13: mod_base = OTHER; note = 2'-O-methylcytidine
  modified_base 14: mod_base = OTHER; note = 2'-fluorouridine
  modified_base 15: mod_base = OTHER; note = 2'-O-methyluridine
  modified_base 16: mod_base = OTHER; note = 2'-fluorocytidine
  modified_base 17: mod_base = OTHER; note = 2'-O-methyladenosine
  modified_base 18: mod_base = OTHER; note = 2'-fluoroadenosine
  modified_base 19: mod_base = OTHER; note = 2'-O-methylguanosine
tagaataaatatcttcaag

SEQ ID NO: 39 - RNA, 19 nt, synthetic construct
  source 1..19: mol_type = other RNA
  modified_base 1: mod_base = OTHER; note = Phosphate 2'-O-methyluridine, wherein phosphate may be absent
  modified_base 2: mod_base = OTHER; note = 2'-fluoroadenosine
  modified_base 3: mod_base = OTHER; note = 2'-O-methyladenosine
  modified_base 4: mod_base = OTHER; note = 2'-fluoroadenosine
  modified_base 5: mod_base = OTHER; note = 2'-O-methylguanosine
  modified_base 6: mod_base = OTHER; note = 2'-fluorocytidine
  modified_base 7: mod_base = OTHER; note = 2'-O-methyladenosine
  modified_base 8: mod_base = OTHER; note = 2'-fluoroadenosine
  modified_base 9: mod_base = OTHER; note = 2'-O-methyladenosine
  modified_base 10: mod_base = OTHER; note = 2'-fluoroadenosine
  modified_base 11: mod_base = OTHER; note = 2'-O-methylcytidine
  modified_base 12: mod_base = OTHER; note = 2'-fluoroadenosine
  modified_base 13: mod_base = OTHER; note = 2'-O-methylguanosine
  modified_base 14: mod_base = OTHER; note = 2'-fluoroguanosine
  modified_base 15: mod_base = OTHER; note = 2'-O-methyluridine
  modified_base 16: mod_base = OTHER; note = 2'-fluorocytidine
  modified_base 17: mod_base = OTHER; note = 2'-O-methyluridine
  modified_base 18: mod_base = OTHER; note = 2'-fluoroadenosine
  modified_base 19: mod_base = OTHER; note = 2'-O-methylguanosine
taaagcaaaacaggtctag

SEQ ID NO: 40 - RNA, 19 nt, synthetic construct
  source 1..19: mol_type = other RNA
  modified_base 1: mod_base = OTHER; note = Phosphate 2'-O-methyluridine, wherein phosphate may be absent
  modified_base 2: mod_base = OTHER; note = 2'-fluorouridine
  modified_base 3: mod_base = OTHER; note = 2'-O-methylguanosine
  modified_base 4: mod_base = OTHER; note = 2'-fluoroguanosine
  modified_base 5: mod_base = OTHER; note = 2'-O-methyladenosine
  modified_base 6: mod_base = OTHER; note = 2'-fluorouridine
  modified_base 7: mod_base = OTHER; note = 2'-O-methyladenosine
  modified_base 8: mod_base = OTHER; note = 2'-fluoroguanosine
  modified_base 9: mod_base = OTHER; note = 2'-O-methylguanosine
  modified_base 10: mod_base = OTHER; note = 2'-fluorocytidine
  modified_base 11: mod_base = OTHER; note = 2'-O-methyladenosine
  modified_base 12: mod_base = OTHER; note = 2'-fluoroguanosine
  modified_base 13: mod_base = OTHER; note = 2'-O-methylguanosine
  modified_base 14: mod_base = OTHER; note = 2'-fluorouridine
  modified_base 15: mod_base = OTHER; note = 2'-O-methylguanosine
  modified_base 16: mod_base = OTHER; note = 2'-fluoroguanosine
  modified_base 17: mod_base = OTHER; note = 2'-O-methyladenosine
  modified_base 18: mod_base = OTHER; note = 2'-fluorocytidine
  modified_base 19: mod_base = OTHER; note = 2'-O-methyluridine
ttggataggcaggtggact

SEQ ID NO: 41 - RNA, 19 nt, synthetic construct
  source 1..19: mol_type = other RNA
  modified_base 1: mod_base = OTHER; note = Phosphate 2'-O-methyluridine, wherein phosphate may be absent
  modified_base 2: mod_base = OTHER; note = 2'-fluoroguanosine
  modified_base 3: mod_base = OTHER; note = 2'-O-methylcytidine
  modified_base 4: mod_base = OTHER; note = 2'-fluoroadenosine
  modified_base 5: mod_base = OTHER; note = 2'-O-methylcytidine
  modified_base 6: mod_base = OTHER; note = 2'-fluorouridine
  modified_base 7: mod_base = OTHER; note = 2'-O-methylguanosine
  modified_base 8: mod_base = OTHER; note = 2'-fluoroadenosine
  modified_base 9: mod_base = OTHER; note = 2'-O-methylguanosine
  modified_base 10: mod_base = OTHER; note = 2'-fluoroadenosine
  modified_base 11: mod_base = OTHER; note = 2'-O-methyladenosine
  modified_base 12: mod_base = OTHER; note = 2'-fluorouridine
  modified_base 13: mod_base = OTHER; note = 2'-O-methyladenosine
  modified_base 14: mod_base = OTHER; note = 2'-fluorocytidine
  modified_base 15: mod_base = OTHER; note = 2'-O-methyluridine
  modified_base 16: mod_base = OTHER; note = 2'-fluoroguanosine
  modified_base 17: mod_base = OTHER; note = 2'-O-methyluridine
  modified_base 18: mod_base = OTHER; note = 2'-fluorocytidine
  modified_base 19: mod_base = OTHER; note = 2'-O-methylcytidine
tgcactgagaatactgtcc

SEQ ID NO: 42 - RNA, 19 nt, synthetic construct
  source 1..19: mol_type = other RNA
  modified_base 1: mod_base = OTHER; note = Phosphate 2'-O-methyluridine, wherein phosphate may be absent
  modified_base 2: mod_base = OTHER; note = 2'-fluorocytidine
  modified_base 3: mod_base = OTHER; note = 2'-O-methyladenosine
  modified_base 4: mod_base = OTHER; note = 2'-fluoroadenosine
  modified_base 5: mod_base = OTHER; note = 2'-O-methylcytidine
  modified_base 6: mod_base = OTHER; note = 2'-fluoroadenosine
  modified_base 7: mod_base = OTHER; note = 2'-O-methyladenosine
  modified_base 8: mod_base = OTHER; note = 2'-fluoroguanosine
  modified_base 9: mod_base = OTHER; note = 2'-O-methylguanosine
  modified_base 10: mod_base = OTHER; note = 2'-fluoroadenosine
  modified_base 11: mod_base = OTHER; note = 2'-O-methylguanosine
  modified_base 12: mod_base = OTHER; note = 2'-fluorouridine
  modified_base 13: mod_base = OTHER; note = 2'-O-methyladenosine
  modified_base 14: mod_base = OTHER; note = 2'-fluorocytidine
  modified_base 15: mod_base = OTHER; note = 2'-O-methylcytidine
  modified_base 16: mod_base = OTHER; note = 2'-fluorocytidine
  modified_base 17: mod_base = OTHER; note = 2'-O-methylguanosine
  modified_base 18: mod_base = OTHER; note = 2'-fluoroguanosine
  modified_base 19: mod_base = OTHER; note = 2'-O-methylguanosine
tcaacaaggagtacccggg

SEQ ID NO: 43 - RNA, 19 nt, synthetic construct
  source 1..19: mol_type = other RNA
  modified_base 1: mod_base = OTHER; note = Phosphate 2'-O-methyluridine, wherein phosphate may be absent
  modified_base 2: mod_base = OTHER; note = 2'-fluorocytidine
  modified_base 3: mod_base = OTHER; note = 2'-O-methyluridine
  modified_base 4: mod_base = OTHER; note = 2'-fluorouridine
  modified_base 5: mod_base = OTHER; note = 2'-O-methylguanosine
  modified_base 6: mod_base = OTHER; note = 2'-fluorouridine
  modified_base 7: mod_base = OTHER; note = 2'-O-methylcytidine
  modified_base 8: mod_base = OTHER; note = 2'-fluorocytidine
  modified_base 9: mod_base = OTHER; note = 2'-O-methyladenosine
  modified_base 10: mod_base = OTHER; note = 2'-fluoroguanosine
  modified_base 11: mod_base = OTHER; note = 2'-O-methylcytidine
  modified_base 12: mod_base = OTHER; note = 2'-fluorouridine
  modified_base 13: mod_base = OTHER; note = 2'-O-methyluridine
  modified_base 14: mod_base = OTHER; note = 2'-fluorouridine
  modified_base 15: mod_base = OTHER; note = 2'-O-methyladenosine
  modified_base 16: mod_base = OTHER; note = 2'-fluorouridine
  modified_base 17: mod_base = OTHER; note = 2'-O-methyluridine
  modified_base 18: mod_base = OTHER; note = 2'-fluoroguanosine
  modified_base 19: mod_base = OTHER; note = 2'-O-methylguanosine
tcttgtccagctttattgg

SEQ ID NO: 44 - RNA, 19 nt, synthetic construct
  source 1..19: mol_type = other RNA
  modified_base 1: mod_base = OTHER; note = Phosphate 2'-O-methyluridine, wherein phosphate may be absent
  modified_base 2: mod_base = OTHER; note = 2'-fluorouridine
  modified_base 3: mod_base = OTHER; note = 2'-O-methylcytidine
  modified_base 4: mod_base = OTHER; note = 2'-fluorocytidine
  modified_base 5: mod_base = OTHER; note = 2'-O-methyladenosine
  modified_base 6: mod_base = OTHER; note = 2'-fluoroguanosine
  modified_base 7: mod_base = OTHER; note = 2'-O-methylcytidine
  modified_base 8: mod_base = OTHER; note = 2'-fluorouridine
  modified_base 9: mod_base = OTHER; note = 2'-O-methyluridine
  modified_base 10: mod_base = OTHER; note = 2'-fluorouridine
  modified_base 11: mod_base = OTHER; note = 2'-O-methyladenosine
  modified_base 12: mod_base = OTHER; note = 2'-fluorouridine
  modified_base 13: mod_base = OTHER; note = 2'-O-methyluridine
  modified_base 14: mod_base = OTHER; note = 2'-fluoroguanosine
  modified_base 15: mod_base = OTHER; note = 2'-O-methylguanosine
  modified_base 16: mod_base = OTHER; note = 2'-fluoroguanosine
  modified_base 17: mod_base = OTHER; note = 2'-O-methyladenosine
  modified_base 18: mod_base = OTHER; note = 2'-fluoroguanosine
  modified_base 19: mod_base = OTHER; note = 2'-O-methylguanosine
ttccagctttattgggagg

SEQ ID NO: 45 - RNA, 19 nt, synthetic construct
  source 1..19: mol_type = other RNA
  modified_base 1: mod_base = OTHER; note = Phosphate 2'-O-methyluridine, wherein phosphate may be absent
  modified_base 2: mod_base = OTHER; note = 2'-fluoroguanosine
  modified_base 3: mod_base = OTHER; note = 2'-O-methyluridine
  modified_base 4: mod_base = OTHER; note = 2'-fluorocytidine
  modified_base 5: mod_base = OTHER; note = 2'-O-methylcytidine
  modified_base 6: mod_base = OTHER; note = 2'-fluoroadenosine
  modified_base 7: mod_base = OTHER; note = 2'-O-methylguanosine
  modified_base 8: mod_base = OTHER; note = 2'-fluorocytidine
  modified_base 9: mod_base = OTHER; note = 2'-O-methyluridine
  modified_base 10: mod_base = OTHER; note = 2'-fluorouridine
  modified_base 11: mod_base = OTHER; note = 2'-O-methyluridine
  modified_base 12: mod_base = OTHER; note = 2'-fluoroadenosine
  modified_base 13: mod_base = OTHER; note = 2'-O-methyluridine
  modified_base 14: mod_base = OTHER; note = 2'-fluorouridine
  modified_base 15: mod_base = OTHER; note = 2'-O-methylguanosine
  modified_base 16: mod_base = OTHER; note = 2'-fluoroguanosine
  modified_base 17: mod_base = OTHER; note = 2'-O-methylguanosine
  modified_base 18: mod_base = OTHER; note = 2'-fluoroadenosine
  modified_base 19: mod_base = OTHER; note = 2'-O-methylguanosine
tgtccagctttattgggag

SEQ ID NO: 46 - RNA, 19 nt, synthetic construct
  source 1..19: mol_type = other RNA
  modified_base 1: mod_base = OTHER; note = Phosphate 2'-O-methyluridine, wherein phosphate may be absent
  modified_base 2: mod_base = OTHER; note = 2'-fluorocytidine
  modified_base 3: mod_base = OTHER; note = 2'-O-methyladenosine
  modified_base 4: mod_base = OTHER; note = 2'-fluorocytidine
  modified_base 5: mod_base = OTHER; note = 2'-O-methyluridine
  modified_base 6: mod_base = OTHER; note = 2'-fluoroguanosine
  modified_base 7: mod_base = OTHER; note = 2'-O-methyladenosine
  modified_base 8: mod_base = OTHER; note = 2'-fluoroguanosine
  modified_base 9: mod_base = OTHER; note = 2'-O-methyladenosine
  modified_base 10: mod_base = OTHER; note = 2'-fluoroadenosine
  modified_base 11: mod_base = OTHER; note = 2'-O-methyluridine
  modified_base 12: mod_base = OTHER; note = 2'-fluoroadenosine
  modified_base 13: mod_base = OTHER; note = 2'-O-methylcytidine
  modified_base 14: mod_base = OTHER; note = 2'-fluorouridine
  modified_base 15: mod_base = OTHER; note = 2'-O-methylguanosine
  modified_base 16: mod_base = OTHER; note = 2'-fluorouridine
  modified_base 17: mod_base = OTHER; note = 2'-O-methylcytidine
  modified_base 18: mod_base = OTHER; note = 2'-fluorocytidine
  modified_base 19: mod_base = OTHER; note = 2'-O-methylcytidine
tcactgagaatactgtccc

SEQ ID NO: 47 - RNA, 15 nt, synthetic construct
  source 1..15: mol_type = other RNA
  modified_base 1: mod_base = OTHER; note = 2'-fluorouridine
  modified_base 2: mod_base = OTHER; note = 2'-O-methyluridine
  modified_base 3: mod_base = OTHER; note = 2'-fluorouridine
  modified_base 4: mod_base = OTHER; note = 2'-O-methylguanosine
  modified_base 5: mod_base = OTHER; note = 2'-fluorouridine
  modified_base 6: mod_base = OTHER; note = 2'-O-methyladenosine
  modified_base 7: mod_base = OTHER; note = 2'-fluoroadenosine
  modified_base 8: mod_base = OTHER; note = 2'-O-methylcytidine
  modified_base 9: mod_base = OTHER; note = 2'-fluorouridine
  modified_base 10: mod_base = OTHER; note = 2'-O-methyluridine
  modified_base 11: mod_base = OTHER; note = 2'-fluoroguanosine
  modified_base 12: mod_base = OTHER; note = 2'-O-methyladenosine
  modified_base 13: mod_base = OTHER; note = 2'-fluoroadenosine
  modified_base 14: mod_base = OTHER; note = 2'-O-methylguanosine
  modified_base 15: mod_base = OTHER; note = 2'-fluoroadenosine
tttgtaacttgaaga

SEQ ID NO: 48 - RNA, 15 nt, synthetic construct
  source 1..15: mol_type = other RNA
  modified_base 1: mod_base = OTHER; note = 2'-fluorocytidine
  modified_base 2: mod_base = OTHER; note = 2'-O-methylcytidine
  modified_base 3: mod_base = OTHER; note = 2'-fluorouridine
  modified_base 4: mod_base = OTHER; note = 2'-O-methylguanosine
  modified_base 5: mod_base = OTHER; note = 2'-fluorouridine
  modified_base 6: mod_base = OTHER; note = 2'-O-methyluridine
  modified_base 7: mod_base = OTHER; note = 2'-fluorouridine
  modified_base 8: mod_base = OTHER; note = 2'-O-methyluridine
  modified_base 9: mod_base = OTHER; note = 2'-fluoroguanosine
  modified_base 10: mod_base = OTHER; note = 2'-O-methylcytidine
  modified_base 11: mod_base = OTHER; note = 2'-fluorouridine
  modified_base 12: mod_base = OTHER; note = 2'-O-methyluridine
  modified_base 13: mod_base = OTHER; note = 2'-fluorouridine
  modified_base 14: mod_base = OTHER; note = 2'-O-methyluridine
  modified_base 15: mod_base = OTHER; note = 2'-fluoroadenosine
cctgttttgctttta

SEQ ID NO: 49 - RNA, 15 nt, synthetic construct
  source 1..15: mol_type = other RNA
  modified_base 1: mod_base = OTHER; note = 2'-fluorouridine
  modified_base 2: mod_base = OTHER; note = 2'-O-methylguanosine
  modified_base 3: mod_base = OTHER; note = 2'-fluorouridine
  modified_base 4: mod_base = OTHER; note = 2'-O-methyluridine
  modified_base 5: mod_base = OTHER; note = 2'-fluorouridine
  modified_base 6: mod_base = OTHER; note = 2'-O-methyluridine
  modified_base 7: mod_base = OTHER; note = 2'-fluoroguanosine
  modified_base 8: mod_base = OTHER; note = 2'-O-methylcytidine
  modified_base 9: mod_base = OTHER; note = 2'-fluorouridine
  modified_base 10: mod_base = OTHER; note = 2'-O-methyluridine
  modified_base 11: mod_base = OTHER; note = 2'-fluorouridine
  modified_base 12: mod_base = OTHER; note = 2'-O-methyluridine
  modified_base 13: mod_base = OTHER; note = 2'-fluoroguanosine
  modified_base 14: mod_base = OTHER; note = 2'-O-methyluridine
  modified_base 15: mod_base = OTHER; note = 2'-fluoroadenosine
tgttttgcttttgta

SEQ ID NO: 50 - RNA, 15 nt, synthetic construct
  source 1..15: mol_type = other RNA
  modified_base 1: mod_base = OTHER; note = 2'-fluorouridine
  modified_base 2: mod_base = OTHER; note = 2'-O-methyladenosine
  modified_base 3: mod_base = OTHER; note = 2'-fluoroguanosine
  modified_base 4: mod_base = OTHER; note = 2'-O-methyladenosine
  modified_base 5: mod_base = OTHER; note = 2'-fluorocytidine
  modified_base 6: mod_base = OTHER; note = 2'-O-methylcytidine
  modified_base 7: mod_base = OTHER; note = 2'-fluorouridine
  modified_base 8: mod_base = OTHER; note = 2'-O-methylguanosine
  modified_base 9: mod_base = OTHER; note = 2'-fluorouridine
  modified_base 10: mod_base = OTHER; note = 2'-O-methyluridine
  modified_base 11: mod_base = OTHER; note = 2'-fluorouridine
  modified_base 12: mod_base = OTHER; note = 2'-O-methyluridine
  modified_base 13: mod_base = OTHER; note = 2'-fluoroguanosine
  modified_base 14: mod_base = OTHER; note = 2'-O-methylcytidine
  modified_base 15: mod_base = OTHER; note = 2'-fluoroadenosine
tagacctgttttgca

SEQ ID NO: 51 - RNA, 15 nt, synthetic construct
  source 1..15: mol_type = other RNA
  modified_base 1: mod_base = OTHER; note = 2'-fluorocytidine
  modified_base 2: mod_base = OTHER; note = 2'-O-methyluridine
  modified_base 3: mod_base = OTHER; note = 2'-fluoroguanosine
  modified_base 4: mod_base = OTHER; note = 2'-O-methyluridine
  modified_base 5: mod_base = OTHER; note = 2'-fluorouridine
  modified_base 6: mod_base = OTHER; note = 2'-O-methyluridine
  modified_base 7: mod_base = OTHER; note = 2'-fluorouridine
  modified_base 8: mod_base = OTHER; note = 2'-O-methylguanosine
  modified_base 9: mod_base = OTHER; note = 2'-fluorocytidine
  modified_base 10: mod_base = OTHER; note = 2'-O-methyluridine
  modified_base 11: mod_base = OTHER; note = 2'-fluorouridine
  modified_base 12: mod_base = OTHER; note = 2'-O-methyluridine
  modified_base 13: mod_base = OTHER; note = 2'-fluorouridine
  modified_base 14: mod_base = OTHER; note = 2'-O-methylguanosine
  modified_base 15: mod_base = OTHER; note = 2'-fluoroadenosine
ctgttttgcttttga

SEQ ID NO: 52 - RNA, 15 nt, synthetic construct
  source 1..15: mol_type = other RNA
  modified_base 1: mod_base = OTHER; note = 2'-fluoroadenosine
  modified_base 2: mod_base = OTHER; note = 2'-O-methyladenosine
  modified_base 3: mod_base = OTHER; note = 2'-fluoroguanosine
  modified_base 4: mod_base = OTHER; note = 2'-O-methyladenosine
  modified_base 5: mod_base = OTHER; note = 2'-fluorouridine
  modified_base 6: mod_base = OTHER; note = 2'-O-methyladenosine
  modified_base 7: mod_base = OTHER; note = 2'-fluorouridine
  modified_base 8: mod_base = OTHER; note = 2'-O-methyluridine
  modified_base 9: mod_base = OTHER; note = 2'-fluorouridine
  modified_base 10: mod_base = OTHER; note = 2'-O-methyladenosine
  modified_base 11: mod_base = OTHER; note = 2'-fluorouridine
  modified_base 12: mod_base = OTHER; note = 2'-O-methyluridine
  modified_base 13: mod_base = OTHER; note = 2'-fluorocytidine
  modified_base 14: mod_base = OTHER; note = 2'-O-methyluridine
  modified_base 15: mod_base = OTHER; note = 2'-fluoroadenosine
aagatatttattcta

SEQ ID NO: 53 - RNA, 15 nt, synthetic construct
  source 1..15: mol_type = other RNA
  modified_base 1: mod_base = OTHER; note = 2'-fluoroadenosine
  modified_base 2: mod_base = OTHER; note = 2'-O-methylcytidine
  modified_base 3: mod_base = OTHER; note = 2'-fluorocytidine
  modified_base 4: mod_base = OTHER; note = 2'-O-methyluridine
  modified_base 5: mod_base = OTHER; note = 2'-fluoroguanosine
  modified_base 6: mod_base = OTHER; note = 2'-O-methyluridine
  modified_base 7: mod_base = OTHER; note = 2'-fluorouridine
  modified_base 8: mod_base = OTHER; note = 2'-O-methyluridine
  modified_base 9: mod_base = OTHER; note = 2'-fluorouridine
  modified_base 10: mod_base = OTHER; note = 2'-O-methylguanosine
  modified_base 11: mod_base = OTHER; note = 2'-fluorocytidine
  modified_base 12: mod_base = OTHER; note = 2'-O-methyluridine
  modified_base 13: mod_base = OTHER; note = 2'-fluorouridine
  modified_base 14: mod_base = OTHER; note = 2'-O-methyluridine
  modified_base 15: mod_base = OTHER; note = 2'-fluoroadenosine
acctgttttgcttta

SEQ ID NO: 54 - RNA, 15 nt, synthetic construct
  source 1..15: mol_type = other RNA
  modified_base 1: mod_base = OTHER; note = 2'-fluorocytidine
  modified_base 2: mod_base = OTHER; note = 2'-O-methyladenosine
  modified_base 3: mod_base = OTHER; note = 2'-fluorocytidine
  modified_base 4: mod_base = OTHER; note = 2'-O-methylcytidine
  modified_base 5: mod_base = OTHER; note = 2'-fluorouridine
  modified_base 6: mod_base = OTHER; note = 2'-O-methylguanosine
  modified_base 7: mod_base = OTHER; note = 2'-fluorocytidine
  modified_base 8: mod_base = OTHER; note = 2'-O-methylcytidine
  modified_base 9: mod_base = OTHER; note = 2'-fluorouridine
  modified_base 10: mod_base = OTHER; note = 2'-O-methyladenosine
  modified_base 11: mod_base = OTHER; note = 2'-fluorouridine
  modified_base 12: mod_base = OTHER; note = 2'-O-methylcytidine
  modified_base 13: mod_base = OTHER; note = 2'-fluorocytidine
  modified_base 14: mod_base = OTHER; note = 2'-O-methyladenosine
  modified_base 15: mod_base = OTHER; note = 2'-fluoroadenosine
cacctgcctatccaa

SEQ ID NO: 55 - RNA, 15 nt, synthetic construct
  source 1..15: mol_type = other RNA
  modified_base 1: mod_base = OTHER; note = 2'-fluoroadenosine
  modified_base 2: mod_base = OTHER; note = 2'-O-methylguanosine
  modified_base 3: mod_base = OTHER; note = 2'-fluorouridine
  modified_base 4: mod_base = OTHER; note = 2'-O-methyladenosine
  modified_base 5: mod_base = OTHER; note = 2'-fluorouridine
  modified_base 6: mod_base = OTHER; note = 2'-O-methyluridine
  modified_base 7: mod_base = OTHER; note = 2'-fluorocytidine
  modified_base 8: mod_base = OTHER; note = 2'-O-methyluridine
  modified_base 9: mod_base = OTHER; note = 2'-fluorocytidine
  modified_base 10: mod_base = OTHER; note = 2'-O-methyladenosine
  modified_base 11: mod_base = OTHER; note = 2'-fluoroguanosine
  modified_base 12: mod_base = OTHER; note = 2'-O-methyluridine
  modified_base 13: mod_base = OTHER; note = 2'-fluoroguanosine
  modified_base 14: mod_base = OTHER; note = 2'-O-methylcytidine
  modified_base 15: mod_base = OTHER; note = 2'-fluoroadenosine
agtattctcagtgca

SEQ ID NO: 56 - RNA, 15 nt, synthetic construct
  source 1..15: mol_type = other RNA
  modified_base 1: mod_base = OTHER; note = 2'-fluoroguanosine
  modified_base 2: mod_base = OTHER; note = 2'-O-methylguanosine
  modified_base 3: mod_base = OTHER; note = 2'-fluorouridine
  modified_base 4: mod_base = OTHER; note = 2'-O-methyladenosine
  modified_base 5: mod_base = OTHER; note = 2'-fluorocytidine
  modified_base 6: mod_base = OTHER; note = 2'-O-methyluridine
  modified_base 7: mod_base = OTHER; note = 2'-fluorocytidine
  modified_base 8: mod_base = OTHER; note = 2'-O-methylcytidine
  modified_base 9: mod_base = OTHER; note = 2'-fluorouridine
  modified_base 10: mod_base = OTHER; note = 2'-O-methyluridine
  modified_base 11: mod_base = OTHER; note = 2'-fluoroguanosine
  modified_base 12: mod_base = OTHER; note = 2'-O-methyluridine
  modified_base 13: mod_base = OTHER; note = 2'-fluorouridine
  modified_base 14: mod_base = OTHER; note = 2'-O-methylguanosine
  modified_base 15: mod_base = OTHER; note = 2'-fluoroadenosine
ggtactccttgttga

SEQ ID NO: 57 - RNA, 15 nt, synthetic construct
  source 1..15: mol_type = other RNA
  modified_base 1: mod_base = OTHER; note = 2'-fluorouridine
  modified_base 2: mod_base = OTHER; note = 2'-O-methyladenosine
  modified_base 3: mod_base = OTHER; note = 2'-fluoroadenosine
  modified_base 4: mod_base = OTHER; note = 2'-O-methyladenosine
  modified_base 5: mod_base = OTHER; note = 2'-fluoroguanosine
  modified_base 6: mod_base = OTHER; note = 2'-O-methylcytidine
  modified_base 7: mod_base = OTHER; note = 2'-fluorouridine
  modified_base 8: mod_base = OTHER; note = 2'-O-methylguanosine
  modified_base 9: mod_base = OTHER; note = 2'-fluoroguanosine
  modified_base 10: mod_base = OTHER; note = 2'-O-methyladenosine
  modified_base 11: mod_base = OTHER; note = 2'-fluorocytidine
  modified_base 12: mod_base = OTHER; note = 2'-O-methyladenosine
  modified_base 13: mod_base = OTHER; note = 2'-fluoroadenosine
  modified_base 14: mod_base = OTHER; note = 2'-O-methylguanosine
  modified_base 15: mod_base = OTHER; note = 2'-fluoroadenosine
taaagctggacaaga

SEQ ID NO: 58 - RNA, 15 nt, synthetic construct
  source 1..15: mol_type = other RNA
  modified_base 1: mod_base = OTHER; note = 2'-fluorocytidine
  modified_base 2: mod_base = OTHER; note = 2'-O-methylcytidine
  modified_base 3: mod_base = OTHER; note = 2'-fluoroadenosine
  modified_base 4: mod_base = OTHER; note = 2'-O-methyladenosine
  modified_base 5: mod_base = OTHER; note = 2'-fluorouridine
  modified_base 6: mod_base = OTHER; note = 2'-O-methyladenosine
  modified_base 7: mod_base = OTHER; note = 2'-fluoroadenosine
  modified_base 8: mod_base = OTHER; note = 2'-O-methyladenosine
  modified_base 9: mod_base = OTHER; note = 2'-fluoroguanosine
  modified_base 10: mod_base = OTHER; note = 2'-O-methylcytidine
  modified_base 11: mod_base = OTHER; note = 2'-fluorouridine
  modified_base 12: mod_base = OTHER; note = 2'-O-methylguanosine
  modified_base 13: mod_base = OTHER; note = 2'-fluoroguanosine
  modified_base 14: mod_base = OTHER; note = 2'-O-methyladenosine
  modified_base 15: mod_base = OTHER; note = 2'-fluoroadenosine
ccaataaagctggaa

SEQ ID NO: 59 - RNA, 15 nt, synthetic construct
  source 1..15: mol_type = other RNA
  modified_base 1: mod_base = OTHER; note = 2'-fluorocytidine
  modified_base 2: mod_base = OTHER; note = 2'-O-methyladenosine
  modified_base 3: mod_base = OTHER; note = 2'-fluoroadenosine
  modified_base 4: mod_base = OTHER; note = 2'-O-methyluridine
  modified_base 5: mod_base = OTHER; note = 2'-fluoroadenosine
  modified_base 6: mod_base = OTHER; note = 2'-O-methyladenosine
  modified_base 7: mod_base = OTHER; note = 2'-fluoroadenosine
  modified_base 8: mod_base = OTHER; note = 2'-O-methylguanosine
  modified_base 9: mod_base = OTHER; note = 2'-fluorocytidine
  modified_base 10: mod_base = OTHER; note = 2'-O-methyluridine
  modified_base 11: mod_base = OTHER; note = 2'-fluoroguanosine
  modified_base 12: mod_base = OTHER; note = 2'-O-methylguanosine
  modified_base 13: mod_base = OTHER; note = 2'-fluoroadenosine
  modified_base 14: mod_base = OTHER; note = 2'-O-methylcytidine
  modified_base 15: mod_base = OTHER; note = 2'-fluoroadenosine
caataaagctggaca

SEQ ID NO: 60 - RNA, 15 nt, synthetic construct
  source 1..15: mol_type = other RNA
  modified_base 1: mod_base = OTHER; note = 2'-fluorocytidine
  modified_base 2: mod_base = OTHER; note = 2'-O-methyladenosine
  modified_base 3: mod_base = OTHER; note = 2'-fluoroguanosine
  modified_base 4: mod_base = OTHER; note = 2'-O-methyluridine
  modified_base 5: mod_base = OTHER; note = 2'-fluoroadenosine
  modified_base 6: mod_base = OTHER; note = 2'-O-methyluridine
  modified_base 7: mod_base = OTHER; note = 2'-fluorouridine
  modified_base 8: mod_base = OTHER; note = 2'-O-methylcytidine
  modified_base 9: mod_base = OTHER; note = 2'-fluorouridine
  modified_base 10: mod_base = OTHER; note = 2'-O-methylcytidine
  modified_base 11: mod_base = OTHER; note = 2'-fluoroadenosine
  modified_base 12: mod_base = OTHER; note = 2'-O-methylguanosine
  modified_base 13: mod_base = OTHER; note = 2'-fluorouridine
  modified_base 14: mod_base = OTHER; note = 2'-O-methylguanosine
  modified_base 15: mod_base = OTHER; note = 2'-fluoroadenosine
cagtattctcagtga

SEQ ID NO: 61 - RNA, 34 nt, synthetic construct
  source 1..34: mol_type = other RNA
  modified_base 1: mod_base = OTHER; note = Phosphate 2'-O-methyluridine, wherein phosphate may be absent
  modified_base 2: mod_base = OTHER; note = 2'-fluorocytidine
  modified_base 3: mod_base = OTHER; note = 2'-O-methyluridine
  modified_base 4: mod_base = OTHER; note = 2'-fluorouridine
  modified_base 5: mod_base = OTHER; note = 2'-O-methylcytidine
  modified_base 6: mod_base = OTHER; note = 2'-fluoroadenosine
  modified_base 7: mod_base = OTHER; note = 2'-O-methyladenosine
  modified_base 8: mod_base = OTHER; note = 2'-fluoroguanosine
  modified_base 9: mod_base = OTHER; note = 2'-O-methyluridine
  modified_base 10: mod_base = OTHER; note = 2'-fluorouridine
  modified_base 11: mod_base = OTHER; note = 2'-O-methyladenosine
  modified_base 12: mod_base = OTHER; note = 2'-fluorocytidine
  modified_base 13: mod_base = OTHER; note = 2'-O-methyladenosine
  modified_base 14: mod_base = OTHER; note = 2'-fluoroadenosine
  modified_base 15: mod_base = OTHER; note = 2'-O-methyladenosine
  modified_base 16: mod_base = OTHER; note = 2'-fluoroadenosine
  modified_base 17: mod_base = OTHER; note = 2'-O-methylguanosine
  modified_base 18: mod_base = OTHER; note = 2'-fluorocytidine
  modified_base 19: mod_base = OTHER; note = 2'-O-methyladenosine
  modified_base 20: mod_base = OTHER; note = 2'-fluorocytidine
  modified_base 21: mod_base = OTHER; note = 2'-O-methyladenosine
  modified_base 22: mod_base = OTHER; note = 2'-fluorocytidine
  modified_base 23: mod_base = OTHER; note = 2'-O-methylcytidine
  modified_base 24: mod_base = OTHER; note = 2'-fluorouridine
  modified_base 25: mod_base = OTHER; note = 2'-O-methylguanosine
  modified_base 26: mod_base = OTHER; note = 2'-fluorocytidine
  modified_base 27: mod_base = OTHER; note = 2'-O-methylcytidine
  modified_base 28: mod_base = OTHER; note = 2'-fluorouridine
  modified_base 29: mod_base = OTHER; note = 2'-O-methyladenosine
  modified_base 30: mod_base = OTHER; note = 2'-fluorouridine
  modified_base 31: mod_base = OTHER; note = 2'-O-methylcytidine
  modified_base 32: mod_base = OTHER; note = 2'-fluorocytidine
  modified_base 33: mod_base = OTHER; note = 2'-O-methyladenosine
  modified_base 34: mod_base = OTHER; note = 2'-fluoroadenosine
tcttcaagttacaaaagcacacctgcctatccaa

SEQ ID NO: 62 - RNA, 34 nt, synthetic construct
  source 1..34: mol_type = other RNA
  modified_base 1: mod_base = OTHER; note = Phosphate 2'-O-methyluridine, wherein phosphate may be absent
  modified_base 2: mod_base = OTHER; note = 2'-fluoroadenosine
  modified_base 3: mod_base = OTHER; note = 2'-O-methyladenosine
  modified_base 4: mod_base = OTHER; note = 2'-fluoroadenosine
  modified_base 5: mod_base = OTHER; note = 2'-O-methyladenosine
  modified_base 6: mod_base = OTHER; note = 2'-fluoroguanosine
  modified_base 7: mod_base = OTHER; note = 2'-O-methylcytidine
  modified_base 8: mod_base = OTHER; note = 2'-fluoroadenosine
  modified_base 9: mod_base = OTHER; note = 2'-O-methyladenosine
  modified_base 10: mod_base = OTHER; note = 2'-fluoroadenosine
  modified_base 11: mod_base = OTHER; note = 2'-O-methyladenosine
  modified_base 12: mod_base = OTHER; note = 2'-fluorocytidine
  modified_base 13: mod_base = OTHER; note = 2'-O-methyladenosine
  modified_base 14: mod_base = OTHER; note = 2'-fluoroguanosine
  modified_base 15: mod_base = OTHER; note = 2'-O-methylguanosine
  modified_base 16: mod_base = OTHER; note = 2'-fluorouridine
  modified_base 17: mod_base = OTHER; note = 2'-O-methylcytidine
  modified_base 18: mod_base = OTHER; note = 2'-fluorouridine
  modified_base 19: mod_base = OTHER; note = 2'-O-methyladenosine
  modified_base 20: mod_base = OTHER; note = 2'-fluorocytidine
  modified_base 21: mod_base = OTHER; note = 2'-O-methyladenosine
  modified_base 22: mod_base = OTHER; note = 2'-fluorocytidine
  modified_base 23: mod_base = OTHER; note = 2'-O-methylcytidine
  modified_base 24: mod_base = OTHER; note = 2'-fluorouridine
  modified_base 25: mod_base = OTHER; note = 2'-O-methylguanosine
  modified_base 26: mod_base = OTHER; note = 2'-fluorocytidine
  modified_base 27: mod_base = OTHER; note = 2'-O-methylcytidine
  modified_base 28: mod_base = OTHER; note = 2'-fluorouridine
  modified_base 29: mod_base = OTHER; note = 2'-O-methyladenosine
  modified_base 30: mod_base = OTHER; note = 2'-fluorouridine
  modified_base 31: mod_base = OTHER; note = 2'-O-methylcytidine
  modified_base 32: mod_base = OTHER; note = 2'-fluorocytidine
  modified_base 33: mod_base = OTHER; note = 2'-O-methyladenosine
  modified_base 34: mod_base = OTHER; note = 2'-fluoroadenosine
taaaagcaaaacaggtctacacctgcctatccaa

SEQ ID NO: 63 - RNA, 34 nt, synthetic construct
  source 1..34: mol_type = other RNA
  modified_base 1: mod_base = OTHER; note = Phosphate 2'-O-methyluridine, wherein phosphate may be absent
  modified_base 2: mod_base = OTHER; note = 2'-fluoroadenosine
  modified_base 3: mod_base = OTHER; note = 2'-O-methylcytidine
  modified_base 4: mod_base = OTHER; note = 2'-fluoroadenosine
  modified_base 5: mod_base = OTHER; note = 2'-O-methyladenosine
  modified_base 6: mod_base = OTHER; note = 2'-fluoroadenosine
  modified_base 7: mod_base = OTHER; note = 2'-O-methyladenosine
  modified_base 8: mod_base = OTHER; note = 2'-fluoroguanosine
  modified_base 9: mod_base = OTHER; note = 2'-O-methylcytidine
  modified_base 10: mod_base = OTHER; note = 2'-fluoroadenosine
  modified_base 11: mod_base = OTHER; note = 2'-O-methyladenosine
  modified_base 12: mod_base = OTHER; note = 2'-fluoroadenosine
  modified_base 13: mod_base = OTHER; note = 2'-O-methyladenosine
  modified_base 14: mod_base = OTHER; note = 2'-fluorocytidine
  modified_base 15: mod_base = OTHER; note = 2'-O-methyladenosine
  modified_base 16: mod_base = OTHER; note = 2'-fluoroguanosine
  modified_base 17: mod_base = OTHER; note = 2'-O-methylguanosine
  modified_base 18: mod_base = OTHER; note = 2'-fluorouridine
  modified_base 19: mod_base = OTHER; note = 2'-O-methylcytidine
  modified_base 20: mod_base = OTHER; note = 2'-fluorocytidine
  modified_base 21: mod_base = OTHER; note = 2'-O-methyladenosine
  modified_base 22: mod_base = OTHER; note = 2'-fluorocytidine
  modified_base 23: mod_base = OTHER; note = 2'-O-methylcytidine
  modified_base 24: mod_base = OTHER; note = 2'-fluorouridine
  modified_base 25: mod_base = OTHER; note = 2'-O-methylguanosine
  modified_base 26: mod_base = OTHER; note = 2'-fluorocytidine
  modified_base 27: mod_base = OTHER; note = 2'-O-methylcytidine
  modified_base 28: mod_base = OTHER; note = 2'-fluorouridine
  modified_base 29: mod_base = OTHER; note = 2'-O-methyladenosine
  modified_base 30: mod_base = OTHER; note = 2'-fluorouridine
  modified_base 31: mod_base = OTHER; note = 2'-O-methylcytidine
  modified_base 32: mod_base = OTHER; note = 2'-fluorocytidine
  modified_base 33: mod_base = OTHER; note = 2'-O-methyladenosine
  modified_base 34: mod_base = OTHER; note = 2'-fluoroadenosine
tacaaaagcaaaacaggtccacctgcctatccaa

SEQ ID NO: 64 - RNA, 34 nt, synthetic construct
  source 1..34: mol_type = other RNA
  modified_base 1: mod_base = OTHER; note = Phosphate 2'-O-methyluridine, wherein phosphate may be absent
  modified_base 2: mod_base = OTHER; note = 2'-fluoroguanosine
  modified_base 3: mod_base = OTHER; note = 2'-O-methylcytidine
  modified_base 4: mod_base = OTHER; note = 2'-fluoroadenosine
  modified_base 5: mod_base = OTHER; note = 2'-O-methyladenosine
  modified_base 6: mod_base = OTHER; note = 2'-fluoroadenosine
  modified_base 7: mod_base = OTHER; note = 2'-O-methyladenosine
  modified_base 8: mod_base = OTHER; note = 2'-fluorocytidine
  modified_base 9: mod_base = OTHER; note = 2'-O-methyladenosine
  modified_base 10: mod_base = OTHER; note = 2'-fluoroguanosine
  modified_base 11: mod_base = OTHER; note = 2'-O-methylguanosine
  modified_base 12: mod_base = OTHER; note = 2'-fluorouridine
  modified_base 13: mod_base = OTHER; note = 2'-O-methylcytidine
  modified_base 14: mod_base = OTHER; note = 2'-fluorouridine
  modified_base 15: mod_base = OTHER; note = 2'-O-methyladenosine
  modified_base 16: mod_base = OTHER; note = 2'-fluoroguanosine
  modified_base 17: mod_base = OTHER; note = 2'-O-methyladenosine
  modified_base 18: mod_base = OTHER; note = 2'-fluoroadenosine
  modified_base 19: mod_base = OTHER; note = 2'-O-methyladenosine
  modified_base 20: mod_base = OTHER; note = 2'-fluorocytidine
  modified_base 21: mod_base = OTHER; note = 2'-O-methyladenosine
  modified_base 22: mod_base = OTHER; note = 2'-fluorocytidine
  modified_base 23: mod_base = OTHER; note = 2'-O-methylcytidine
  modified_base 24: mod_base = OTHER; note = 2'-fluorouridine
  modified_base 25: mod_base = OTHER; note = 2'-O-methylguanosine
  modified_base 26: mod_base = OTHER; note = 2'-fluorocytidine
  modified_base 27: mod_base = OTHER; note = 2'-O-methylcytidine
  modified_base 28: mod_base = OTHER; note = 2'-fluorouridine
  modified_base 29: mod_base = OTHER; note = 2'-O-methyladenosine
  modified_base 30: mod_base = OTHER; note = 2'-fluorouridine
  modified_base 31: mod_base = OTHER; note = 2'-O-methylcytidine
  modified_base 32: mod_base = OTHER; note = 2'-fluorocytidine
  modified_base 33: mod_base = OTHER; note = 2'-O-methyladenosine
  modified_base 34: mod_base = OTHER; note = 2'-fluoroadenosine
tgcaaaacaggtctagaaacacctgcctatccaa

SEQ ID NO: 65 - RNA, 34 nt, synthetic construct
  source 1..34: mol_type = other RNA
  modified_base 1: mod_base = OTHER; note = Phosphate 2'-O-methyluridine, wherein phosphate may be absent
  modified_base 2: mod_base = OTHER; note = 2'-fluorocytidine
  modified_base 3: mod_base = OTHER; note = 2'-O-methyladenosine
  modified_base 4: mod_base = OTHER; note = 2'-fluoroadenosine
  modified_base 5: mod_base = OTHER; note = 2'-O-methyladenosine
  modified_base 6: mod_base = OTHER; note = 2'-fluoroadenosine
  modified_base 7: mod_base = OTHER; note = 2'-O-methylguanosine
  modified_base 8: mod_base = OTHER; note = 2'-fluorocytidine
  modified_base 9: mod_base = OTHER; note = 2'-O-methyladenosine
  modified_base 10: mod_base = OTHER; note = 2'-fluoroadenosine
  modified_base 11: mod_base = OTHER; note = 2'-O-methyladenosine
  modified_base 12: mod_base = OTHER; note = 2'-fluoroadenosine
  modified_base 13: mod_base = OTHER; note = 2'-O-methylcytidine
  modified_base 14: mod_base = OTHER; note = 2'-fluoroadenosine
  modified_base 15: mod_base = OTHER; note = 2'-O-methylguanosine
  modified_base 16: mod_base = OTHER; note = 2'-fluoroguanosine
  modified_base 17: mod_base = OTHER; note = 2'-O-methyluridine
  modified_base 18: mod_base = OTHER; note = 2'-fluorocytidine
  modified_base 19: mod_base = OTHER; note = 2'-O-methyluridine
  modified_base 20: mod_base = OTHER; note = 2'-fluorocytidine
  modified_base 21: mod_base = OTHER; note = 2'-O-methyladenosine
  modified_base 22: mod_base = OTHER; note = 2'-fluorocytidine
  modified_base 23: mod_base = OTHER; note = 2'-O-methylcytidine
  modified_base 24: mod_base = OTHER; note = 2'-fluorouridine
  modified_base 25: mod_base = OTHER; note = 2'-O-methylguanosine
  modified_base 26: mod_base = OTHER; note = 2'-fluorocytidine
  modified_base 27: mod_base = OTHER; note = 2'-O-methylcytidine
  modified_base 28: mod_base = OTHER; note = 2'-fluorouridine
  modified_base 29: mod_base = OTHER; note = 2'-O-methyladenosine
  modified_base 30: mod_base = OTHER; note = 2'-fluorouridine
  modified_base 31: mod_base = OTHER; note = 2'-O-methylcytidine
  modified_base 32: mod_base = OTHER; note = 2'-fluorocytidine
  modified_base 33: mod_base = OTHER; note = 2'-O-methyladenosine
  modified_base 34: mod_base = OTHER; note = 2'-fluoroadenosine
tcaaaagcaaaacaggtctcacctgcctatccaa

SEQ ID NO: 66 - RNA, 34 nt, synthetic construct
  source 1..34: mol_type = other RNA
  modified_base 1: mod_base = OTHER; note = Phosphate 2'-O-methyluridine, wherein phosphate may be absent
  modified_base 2: mod_base = OTHER; note = 2'-fluoroadenosine
  modified_base 3: mod_base = OTHER; note = 2'-O-methylguanosine
  modified_base 4: mod_base = OTHER; note = 2'-fluoroadenosine
  modified_base 5: mod_base = OTHER; note = 2'-O-methyladenosine
  modified_base 6: mod_base = OTHER; note = 2'-fluorouridine
  modified_base 7: mod_base = OTHER; note = 2'-O-methyladenosine
  modified_base 8: mod_base = OTHER; note = 2'-fluoroadenosine
  modified_base 9: mod_base = OTHER; note = 2'-O-methyladenosine
  modified_base 10: mod_base = OTHER; note = 2'-fluorouridine
  modified_base 11: mod_base = OTHER; note = 2'-O-methyladenosine
  modified_base 12: mod_base = OTHER; note = 2'-fluorouridine
  modified_base 13: mod_base = OTHER; note = 2'-O-methylcytidine
  modified_base 14: mod_base = OTHER; note = 2'-fluorouridine
  modified_base 15: mod_base = OTHER; note = 2'-O-methyluridine
  modified_base 16: mod_base = OTHER; note = 2'-fluorocytidine
  modified_base 17: mod_base = OTHER; note = 2'-O-methyladenosine
  modified_base 18: mod_base = OTHER; note = 2'-fluoroadenosine
  modified_base 19: mod_base = OTHER; note = 2'-O-methylguanosine
  modified_base 20: mod_base = OTHER; note = 2'-fluorocytidine
  modified_base 21: mod_base = OTHER; note = 2'-O-methyladenosine
  modified_base 22: mod_base = OTHER; note = 2'-fluorocytidine
  modified_base 23: mod_base = OTHER; note = 2'-O-methylcytidine
  modified_base 24: mod_base = OTHER; note = 2'-fluorouridine
  modified_base 25: mod_base = OTHER; note = 2'-O-methylguanosine
  modified_base 26: mod_base = OTHER; note = 2'-fluorocytidine
  modified_base 27: mod_base = OTHER; note = 2'-O-methylcytidine
  modified_base 28: mod_base = OTHER; note = 2'-fluorouridine
  modified_base 29: mod_base = OTHER; note = 2'-O-methyladenosine
  modified_base 30: mod_base = OTHER; note = 2'-fluorouridine
  modified_base 31: mod_base = OTHER; note = 2'-O-methylcytidine
  modified_base 32: mod_base = OTHER; note = 2'-fluorocytidine
  modified_base 33: mod_base = OTHER; note = 2'-O-methyladenosine
  modified_base 34: mod_base = OTHER; note = 2'-fluoroadenosine
tagaataaatatcttcaagcacctgcctatccaa

SEQ ID NO: 67 - RNA, 34 nt, synthetic construct
  source 1..34: mol_type = other RNA
  modified_base 1: mod_base = OTHER; note = Phosphate 2'-O-methyluridine, wherein phosphate may be absent
  modified_base 2: mod_base = OTHER; note = 2'-fluoroadenosine
  modified_base 3: mod_base = OTHER; note = 2'-O-methyladenosine
  modified_base 4: mod_base = OTHER; note = 2'-fluoroadenosine
  modified_base 5: mod_base = OTHER; note = 2'-O-methylguanosine
  modified_base 6: mod_base = OTHER; note = 2'-fluorocytidine
  modified_base 7: mod_base = OTHER; note = 2'-O-methyladenosine
  modified_base 8: mod_base = OTHER; note = 2'-fluoroadenosine
  modified_base 9: mod_base = OTHER; note = 2'-O-methyladenosine
  modified_base 10: mod_base = OTHER; note = 2'-fluoroadenosine
  modified_base 11: mod_base = OTHER; note = 2'-O-methylcytidine
  modified_base 12: mod_base = OTHER; note = 2'-fluoroadenosine
  modified_base 13: mod_base = OTHER; note = 2'-O-methylguanosine
  modified_base 14: mod_base = OTHER; note = 2'-fluoroguanosine
  modified_base 15: mod_base = OTHER; note = 2'-O-methyluridine
  modified_base 16: mod_base = OTHER; note = 2'-fluorocytidine
  modified_base 17: mod_base = OTHER; note = 2'-O-methyluridine
  modified_base 18: mod_base = OTHER; note = 2'-fluoroadenosine
  modified_base 19: mod_base = OTHER; note = 2'-O-methylguanosine
  modified_base 20: mod_base = OTHER; note = 2'-fluorocytidine
  modified_base 21: mod_base = OTHER; note = 2'-O-methyladenosine
  modified_base 22: mod_base = OTHER; note = 2'-fluorocytidine
  modified_base 23: mod_base = OTHER; note = 2'-O-methylcytidine
  modified_base 24: mod_base = OTHER; note = 2'-fluorouridine
  modified_base 25: mod_base = OTHER; note = 2'-O-methylguanosine
  modified_base 26: mod_base = OTHER; note = 2'-fluorocytidine
  modified_base 27: mod_base = OTHER; note = 2'-O-methylcytidine
  modified_base 28: mod_base = OTHER; note = 2'-fluorouridine
  modified_base 29: mod_base = OTHER; note = 2'-O-methyladenosine
  modified_base 30: mod_base = OTHER; note = 2'-fluorouridine
  modified_base 31: mod_base = OTHER; note = 2'-O-methylcytidine
  modified_base 32: mod_base = OTHER; note = 2'-fluorocytidine
  modified_base 33: mod_base = OTHER; note = 2'-O-methyladenosine
  modified_base 34: mod_base = OTHER; note = 2'-fluoroadenosine
taaagcaaaacaggtctagcacctgcctatccaa

SEQ ID NO: 68 - RNA, 34 nt, synthetic construct
  source 1..34: mol_type = other RNA
  modified_base 1: mod_base = OTHER; note = Phosphate 2'-O-methyluridine, wherein phosphate may be absent
  modified_base 2: mod_base = OTHER; note = 2'-fluorocytidine
  modified_base 3: mod_base = OTHER; note = 2'-O-methyluridine
  modified_base 4: mod_base = OTHER; note = 2'-fluorouridine
  modified_base 5: mod_base = OTHER; note = 2'-O-methylcytidine
  modified_base 6: mod_base = OTHER; note = 2'-fluoroadenosine
  modified_base 7: mod_base = OTHER; note = 2'-O-methyladenosine
  modified_base 8: mod_base = OTHER; note = 2'-fluoroguanosine
  modified_base 9: mod_base = OTHER; note = 2'-O-methyluridine
  modified_base 10: mod_base = OTHER; note = 2'-fluorouridine
  modified_base 11: mod_base = OTHER; note = 2'-O-methyladenosine
  modified_base 12: mod_base = OTHER; note = 2'-fluorocytidine
  modified_base 13: mod_base = OTHER; note = 2'-O-methyladenosine
  modified_base 14: mod_base = OTHER; note = 2'-fluoroadenosine
  modified_base 15: mod_base = OTHER; note = 2'-O-methyladenosine
  modified_base 16: mod_base = OTHER; note = 2'-fluoroadenosine
  modified_base 17: mod_base = OTHER; note = 2'-O-methylguanosine
  modified_base 18: mod_base = OTHER; note = 2'-fluorocytidine
  modified_base 19: mod_base = OTHER; note = 2'-O-methyladenosine
  modified_base 20: mod_base = OTHER; note = 2'-fluoroadenosine
  modified_base 21: mod_base = OTHER; note = 2'-O-methylguanosine
  modified_base 22: mod_base = OTHER; note = 2'-fluorouridine
  modified_base 23: mod_base = OTHER; note = 2'-O-methyladenosine
  modified_base 24: mod_base = OTHER; note = 2'-fluorouridine
  modified_base 25: mod_base = OTHER; note = 2'-O-methyluridine
  modified_base 26: mod_base = OTHER; note = 2'-fluorocytidine
  modified_base 27: mod_base = OTHER; note = 2'-O-methyluridine
  modified_base 28: mod_base = OTHER; note = 2'-fluorocytidine
  modified_base 29: mod_base = OTHER; note = 2'-O-methyladenosine
  modified_base 30: mod_base = OTHER; note = 2'-fluoroguanosine
  modified_base 31: mod_base = OTHER; note = 2'-O-methyluridine
  modified_base 32: mod_base = OTHER; note = 2'-fluoroguanosine
  modified_base 33: mod_base = OTHER; note = 2'-O-methylcytidine
  modified_base 34: mod_base = OTHER; note = 2'-fluoroadenosine
tcttcaagttacaaaagcaagtattctcagtgca

SEQ ID NO: 69 - RNA, 34 nt, synthetic construct
  source 1..34: mol_type = other RNA
  modified_base 1: mod_base = OTHER; note = Phosphate 2'-O-methyluridine, wherein phosphate may be absent
  modified_base 2: mod_base = OTHER; note = 2'-fluoroadenosine
  modified_base 3: mod_base = OTHER; note = 2'-O-methyladenosine
  modified_base 4: mod_base = OTHER; note = 2'-fluoroadenosine
  modified_base 5: mod_base = OTHER; note = 2'-O-methyladenosine
  modified_base 6: mod_base = OTHER; note = 2'-fluoroguanosine
  modified_base 7: mod_base = OTHER; note = 2'-O-methylcytidine
  modified_base 8: mod_base = OTHER; note = 2'-fluoroadenosine
  modified_base 9: mod_base = OTHER; note = 2'-O-methyladenosine
  modified_base 10: mod_base = OTHER; note = 2'-fluoroadenosine
  modified_base 11: mod_base = OTHER; note = 2'-O-methyladenosine
  modified_base 12: mod_base = OTHER; note = 2'-fluorocytidine
  modified_base 13: mod_base = OTHER; note = 2'-O-methyladenosine
  modified_base 14: mod_base = OTHER; note = 2'-fluoroguanosine
  modified_base 15: mod_base = OTHER; note = 2'-O-methylguanosine
  modified_base 16: mod_base = OTHER; note = 2'-fluorouridine
  modified_base 17: mod_base = OTHER; note = 2'-O-methylcytidine
  modified_base 18: mod_base = OTHER; note = 2'-fluorouridine
  modified_base 19: mod_base = OTHER; note = 2'-O-methyladenosine
  modified_base 20: mod_base = OTHER; note = 2'-fluoroadenosine
  modified_base 21: mod_base = OTHER; note = 2'-O-methylguanosine
  modified_base 22: mod_base = OTHER; note = 2'-fluorouridine
  modified_base 23: mod_base = OTHER; note = 2'-O-methyladenosine
  modified_base 24: mod_base = OTHER; note = 2'-fluorouridine
  modified_base 25: mod_base = OTHER; note = 2'-O-methyluridine
  modified_base 26: mod_base = OTHER; note = 2'-fluorocytidine
  modified_base 27: mod_base = OTHER; note = 2'-O-methyluridine
  modified_base 28: mod_base = OTHER; note = 2'-fluorocytidine
  modified_base 29: mod_base = OTHER; note = 2'-O-methyladenosine
  modified_base 30: mod_base = OTHER; note = 2'-fluoroguanosine
  modified_base 31: mod_base = OTHER; note = 2'-O-methyluridine
  modified_base 32: mod_base = OTHER; note = 2'-fluoroguanosine
  modified_base 33: mod_base = OTHER; note = 2'-O-methylcytidine
  modified_base 34: mod_base = OTHER; note = 2'-fluoroadenosine
taaaagcaaaacaggtctaagtattctcagtgca

SEQ ID NO: 70 - RNA, 34 nt, synthetic construct
  source 1..34: mol_type = other RNA
  modified_base 1: mod_base = OTHER; note = Phosphate 2'-O-methyluridine, wherein phosphate may be absent
  modified_base 2: mod_base = OTHER; note = 2'-fluoroadenosine
  modified_base 3: mod_base = OTHER; note = 2'-O-methylcytidine
  modified_base 4: mod_base = OTHER; note = 2'-fluoroadenosine
  modified_base 5: mod_base = OTHER; note = 2'-O-methyladenosine
  modified_base 6: mod_base = OTHER; note = 2'-fluoroadenosine
  modified_base 7: mod_base = OTHER; note = 2'-O-methyladenosine
  modified_base 8: mod_base = OTHER; note = 2'-fluoroguanosine
  modified_base 9: mod_base = OTHER; note = 2'-O-methylcytidine
  modified_base 10: mod_base = OTHER; note = 2'-fluoroadenosine
  modified_base 11: mod_base = OTHER; note = 2'-O-methyladenosine
  modified_base 12: mod_base = OTHER; note = 2'-fluoroadenosine
  modified_base 13: mod_base = OTHER; note = 2'-O-methyladenosine
  modified_base 14: mod_base = OTHER; note = 2'-fluorocytidine
  modified_base 15: mod_base = OTHER; note = 2'-O-methyladenosine
  modified_base 16: mod_base = OTHER; note = 2'-fluoroguanosine
  modified_base 17: mod_base = OTHER; note = 2'-O-methylguanosine
  modified_base 18: mod_base = OTHER; note = 2'-fluorouridine
  modified_base 19: mod_base = OTHER; note = 2'-O-methylcytidine
  modified_base 20: mod_base = OTHER; note = 2'-fluoroadenosine
  modified_base 21: mod_base = OTHER; note = 2'-O-methylguanosine
  modified_base 22: mod_base = OTHER; note = 2'-fluorouridine
  modified_base 23: mod_base = OTHER; note = 2'-O-methyladenosine
  modified_base 24: mod_base = OTHER; note = 2'-fluorouridine
  modified_base 25: mod_base = OTHER; note = 2'-O-methyluridine
  modified_base 26: mod_base = OTHER; note = 2'-fluorocytidine
  modified_base 27: mod_base = OTHER; note = 2'-O-methyluridine
  modified_base 28: mod_base = OTHER; note = 2'-fluorocytidine
  modified_base 29: mod_base = OTHER; note = 2'-O-methyladenosine
  modified_base 30: mod_base = OTHER; note = 2'-fluoroguanosine
  modified_base 31: mod_base = OTHER; note = 2'-O-methyluridine
  modified_base 32: mod_base = OTHER; note = 2'-fluoroguanosine
  modified_base 33: mod_base = OTHER; note = 2'-O-methylcytidine
  modified_base 34: mod_base = OTHER; note = 2'-fluoroadenosine
tacaaaagcaaaacaggtcagtattctcagtgca

SEQ ID NO: 71 - RNA, 34 nt, synthetic construct
  source 1..34: mol_type = other RNA
  modified_base 1: mod_base = OTHER; note = Phosphate 2'-O-methyluridine, wherein phosphate may be absent
  modified_base 2: mod_base = OTHER; note = 2'-fluoroguanosine
  modified_base 3: mod_base = OTHER; note = 2'-O-methylcytidine
  modified_base 4: mod_base = OTHER; note = 2'-fluoroadenosine
  modified_base 5: mod_base = OTHER; note = 2'-O-methyladenosine
  modified_base 6: mod_base = OTHER; note = 2'-fluoroadenosine
  modified_base 7: mod_base = OTHER; note = 2'-O-methyladenosine
  modified_base 8: mod_base = OTHER; note = 2'-fluorocytidine
  modified_base 9: mod_base = OTHER; note = 2'-O-methyladenosine
  modified_base 10: mod_base = OTHER; note = 2'-fluoroguanosine
  modified_base 11: mod_base = OTHER; note = 2'-O-methylguanosine
  modified_base 12: mod_base = OTHER; note = 2'-fluorouridine
  modified_base 13: mod_base = OTHER; note = 2'-O-methylcytidine
  modified_base 14: mod_base = OTHER; note = 2'-fluorouridine
  modified_base 15: mod_base = OTHER; note = 2'-O-methyladenosine
  modified_base 16: mod_base = OTHER; note = 2'-fluoroguanosine
  modified_base 17: mod_base = OTHER; note = 2'-O-methyladenosine
  modified_base 18: mod_base = OTHER; note = 2'-fluoroadenosine
  modified_base 19: mod_base = OTHER; note = 2'-O-methyladenosine
  modified_base 20: mod_base = OTHER; note = 2'-fluoroadenosine
  modified_base 21: mod_base = OTHER; note = 2'-O-methylguanosine
  modified_base 22: mod_base = OTHER; note = 2'-fluorouridine
  modified_base 23: mod_base = OTHER; note = 2'-O-methyladenosine
  modified_base 24: mod_base = OTHER; note = 2'-fluorouridine
  modified_base 25: mod_base = OTHER; note = 2'-O-methyluridine
  modified_base 26: mod_base = OTHER; note = 2'-fluorocytidine
  modified_base 27: mod_base = OTHER; note = 2'-O-methyluridine
  modified_base 28: mod_base = OTHER; note = 2'-fluorocytidine
  modified_base 29: mod_base = OTHER; note = 2'-O-methyladenosine
  modified_base 30: mod_base = OTHER; note = 2'-fluoroguanosine
  modified_base 31: mod_base = OTHER; note = 2'-O-methyluridine
  modified_base 32: mod_base = OTHER; note = 2'-fluoroguanosine
  modified_base 33: mod_base = OTHER; note = 2'-O-methylcytidine
  modified_base 34: mod_base = OTHER; note = 2'-fluoroadenosine
tgcaaaacaggtctagaaaagtattctcagtgca

SEQ ID NO: 72 - RNA, 34 nt, synthetic construct
  source 1..34: mol_type = other RNA
  modified_base 1: mod_base = OTHER; note = Phosphate 2'-O-methyluridine, wherein phosphate may be absent
  modified_base 2: mod_base = OTHER; note = 2'-fluorocytidine
  modified_base 3: mod_base = OTHER; note = 2'-O-methyladenosine
  modified_base 4: mod_base = OTHER; note = 2'-fluoroadenosine
  modified_base 5: mod_base = OTHER; note = 2'-O-methyladenosine
  modified_base 6: mod_base = OTHER; note = 2'-fluoroadenosine
  modified_base 7: mod_base = OTHER; note = 2'-O-methylguanosine
  modified_base 8: mod_base = OTHER; note = 2'-fluorocytidine
  modified_base 9: mod_base = OTHER; note = 2'-O-methyladenosine
  modified_base 10: mod_base = OTHER; note = 2'-fluoroadenosine
  modified_base 11: mod_base = OTHER; note = 2'-O-methyladenosine
  modified_base 12: mod_base = OTHER; note = 2'-fluoroadenosine
  modified_base 13: mod_base = OTHER; note = 2'-O-methylcytidine
  modified_base 14: mod_base = OTHER; note = 2'-fluoroadenosine
  modified_base 15: mod_base = OTHER; note = 2'-O-methylguanosine
  modified_base 16: mod_base = OTHER; note = 2'-fluoroguanosine
  modified_base 17: mod_base = OTHER; note = 2'-O-methyluridine
  modified_base 18: mod_base = OTHER; note = 2'-fluorocytidine
  modified_base 19: mod_base = OTHER; note = 2'-O-methyluridine
  modified_base 20: mod_base = OTHER; note = 2'-fluoroadenosine
  modified_base 21: mod_base = OTHER; note = 2'-O-methylguanosine
  modified_base 22: mod_base = OTHER; note = 2'-fluorouridine
  modified_base 23: mod_base = OTHER; note = 2'-O-methyladenosine
  modified_base 24: mod_base = OTHER; note = 2'-fluorouridine
  modified_base 25: mod_base = OTHER; note = 2'-O-methyluridine
  modified_base 26: mod_base = OTHER; note = 2'-fluorocytidine
  modified_base 27: mod_base = OTHER; note = 2'-O-methyluridine
  modified_base 28: mod_base = OTHER; note = 2'-fluorocytidine
  modified_base 29: mod_base = OTHER; note = 2'-O-methyladenosine
  modified_base 30: mod_base = OTHER; note = 2'-fluoroguanosine
  modified_base 31: mod_base = OTHER; note = 2'-O-methyluridine
  modified_base 32: mod_base = OTHER; note = 2'-fluoroguanosine
  modified_base 33: mod_base = OTHER; note = 2'-O-methylcytidine
  modified_base 34: mod_base = OTHER; note = 2'-fluoroadenosine
tcaaaagcaaaacaggtctagtattctcagtgca

SEQ ID NO: 73 - RNA, 34 nt, synthetic construct
  source 1..34: mol_type = other RNA
  modified_base 1: mod_base = OTHER; note = Phosphate 2'-O-methyluridine, wherein phosphate may be absent
  modified_base 2: mod_base = OTHER; note = 2'-fluoroadenosine
  modified_base 3: mod_base = OTHER; note = 2'-O-methylguanosine
  modified_base 4: mod_base = OTHER; note = 2'-fluoroadenosine
  modified_base 5: mod_base = OTHER; note = 2'-O-methyladenosine
  modified_base 6: mod_base = OTHER; note = 2'-fluorouridine
  modified_base 7: mod_base = OTHER; note = 2'-O-methyladenosine
  modified_base 8: mod_base = OTHER; note = 2'-fluoroadenosine
  modified_base 9: mod_base = OTHER; note = 2'-O-methyladenosine
  modified_base 10: mod_base = OTHER; note = 2'-fluorouridine
  modified_base 11: mod_base = OTHER; note = 2'-O-methyladenosine
  modified_base 12: mod_base = OTHER; note = 2'-fluorouridine
  modified_base 13: mod_base = OTHER; note = 2'-O-methylcytidine
  modified_base 14: mod_base = OTHER; note = 2'-fluorouridine
  modified_base 15: mod_base = OTHER; note = 2'-O-methyluridine
  modified_base 16: mod_base = OTHER; note = 2'-fluorocytidine
  modified_base 17: mod_base = OTHER; note = 2'-O-methyladenosine
  modified_base 18: mod_base = OTHER; note = 2'-fluoroadenosine
  modified_base 19: mod_base = OTHER; note = 2'-O-methylguanosine
  modified_base 20: mod_base = OTHER; note = 2'-fluoroadenosine
  modified_base 21: mod_base = OTHER; note = 2'-O-methylguanosine
  modified_base 22: mod_base = OTHER; note = 2'-fluorouridine
  modified_base 23: mod_base = OTHER; note = 2'-O-methyladenosine
  modified_base 24: mod_base = OTHER; note = 2'-fluorouridine
  modified_base 25: mod_base = OTHER; note = 2'-O-methyluridine
  modified_base 26: mod_base = OTHER; note = 2'-fluorocytidine
  modified_base 27: mod_base = OTHER; note = 2'-O-methyluridine
  modified_base 28: mod_base = OTHER; note = 2'-fluorocytidine
  modified_base 29: mod_base = OTHER; note = 2'-O-methyladenosine
  modified_base 30: mod_base = OTHER; note = 2'-fluoroguanosine
  modified_base 31: mod_base = OTHER; note = 2'-O-methyluridine
  modified_base 32: mod_base = OTHER; note = 2'-fluoroguanosine
  modified_base 33: mod_base = OTHER; note = 2'-O-methylcytidine
  modified_base 34: mod_base = OTHER; note = 2'-fluoroadenosine
tagaataaatatcttcaagagtattctcagtgca

SEQ ID NO: 74 - RNA, 34 nt, synthetic construct
  source 1..34: mol_type = other RNA
  modified_base 1: mod_base = OTHER; note = Phosphate 2'-O-methyluridine, wherein phosphate may be absent
  modified_base 2: mod_base = OTHER; note = 2'-fluoroadenosine
  modified_base 3: mod_base = OTHER; note = 2'-O-methyladenosine
  modified_base 4: mod_base = OTHER; note = 2'-fluoroadenosine
  modified_base 5: mod_base = OTHER; note = 2'-O-methylguanosine
  modified_base 6: mod_base = OTHER; note = 2'-fluorocytidine
  modified_base 7: mod_base = OTHER; note = 2'-O-methyladenosine
  modified_base 8: mod_base = OTHER; note = 2'-fluoroadenosine
  modified_base 9: mod_base = OTHER; note = 2'-O-methyladenosine
  modified_base 10: mod_base = OTHER; note = 2'-fluoroadenosine
  modified_base 11: mod_base = OTHER; note = 2'-O-methylcytidine
  modified_base 12: mod_base = OTHER; note = 2'-fluoroadenosine
  modified_base 13: mod_base = OTHER; note = 2'-O-methylguanosine
  modified_base 14: mod_base = OTHER; note = 2'-fluoroguanosine
  modified_base 15: mod_base = OTHER; note = 2'-O-methyluridine
  modified_base 16: mod_base = OTHER; note = 2'-fluorocytidine
  modified_base 17: mod_base = OTHER; note = 2'-O-methyluridine
  modified_base 18: mod_base = OTHER; note = 2'-fluoroadenosine
  modified_base 19: mod_base = OTHER; note = 2'-O-methylguanosine
  modified_base 20: mod_base = OTHER; note = 2'-fluoroadenosine
  modified_base 21: mod_base = OTHER; note = 2'-O-methylguanosine
  modified_base 22: mod_base = OTHER; note = 2'-fluorouridine
  modified_base 23: mod_base = OTHER; note = 2'-O-methyladenosine
  modified_base 24: mod_base = OTHER; note = 2'-fluorouridine
  modified_base 25: mod_base = OTHER; note = 2'-O-methyluridine
  modified_base 26: mod_base = OTHER; note = 2'-fluorocytidine
  modified_base 27: mod_base = OTHER; note = 2'-O-methyluridine
  modified_base 28: mod_base = OTHER; note = 2'-fluorocytidine
  modified_base 29: mod_base = OTHER; note = 2'-O-methyladenosine
  modified_base 30: mod_base = OTHER; note = 2'-fluoroguanosine
  modified_base 31: mod_base = OTHER; note = 2'-O-methyluridine
  modified_base 32: mod_base = OTHER; note = 2'-fluoroguanosine
  modified_base 33: mod_base = OTHER; note = 2'-O-methylcytidine
  modified_base 34: mod_base = OTHER; note = 2'-fluoroadenosine
taaagcaaaacaggtctagagtattctcagtgca

SEQ ID NO: 75 - RNA, 34 nt, synthetic construct
  source 1..34: mol_type = other RNA
  modified_base 1: mod_base = OTHER; note = Phosphate 2'-O-methyluridine, wherein phosphate may be absent
  modified_base 2: mod_base = OTHER; note = 2'-fluorocytidine
  modified_base 3: mod_base = OTHER; note = 2'-O-methyluridine
  modified_base 4: mod_base = OTHER; note = 2'-fluorouridine
  modified_base 5: mod_base = OTHER; note = 2'-O-methylcytidine
  modified_base 6: mod_base = OTHER; note = 2'-fluoroadenosine
  modified_base 7: mod_base = OTHER; note = 2'-O-methyladenosine
  modified_base 8: mod_base = OTHER; note = 2'-fluoroguanosine
  modified_base 9: mod_base = OTHER; note = 2'-O-methyluridine
  modified_base 10: mod_base = OTHER; note = 2'-fluorouridine
  modified_base 11: mod_base = OTHER; note = 2'-O-methyladenosine
  modified_base 12: mod_base = OTHER; note = 2'-fluorocytidine
  modified_base 13: mod_base = OTHER; note = 2'-O-methyladenosine
  modified_base 14: mod_base = OTHER; note = 2'-fluoroadenosine
  modified_base 15: mod_base = OTHER; note = 2'-O-methyladenosine
  modified_base 16: mod_base = OTHER; note = 2'-fluoroadenosine
  modified_base 17: mod_base = OTHER; note = 2'-O-methylguanosine
  modified_base 18: mod_base = OTHER; note = 2'-fluorocytidine
  modified_base 19: mod_base = OTHER; note = 2'-O-methyladenosine
  modified_base 20: mod_base = OTHER; note = 2'-fluoroguanosine
  modified_base 21: mod_base = OTHER; note = 2'-O-methylguanosine
  modified_base 22: mod_base = OTHER; note = 2'-fluorouridine
  modified_base 23: mod_base = OTHER; note = 2'-O-methyladenosine
  modified_base 24: mod_base = OTHER; note = 2'-fluorocytidine
  modified_base 25: mod_base = OTHER; note = 2'-O-methyluridine
  modified_base 26: mod_base = OTHER; note = 2'-fluorocytidine
  modified_base 27: mod_base = OTHER; note = 2'-O-methylcytidine
  modified_base 28: mod_base = OTHER; note = 2'-fluorouridine
  modified_base 29: mod_base = OTHER; note = 2'-O-methyluridine
  modified_base 30: mod_base = OTHER; note = 2'-fluoroguanosine
  modified_base 31: mod_base = OTHER; note = 2'-O-methyluridine
  modified_base 32: mod_base = OTHER; note = 2'-fluorouridine
  modified_base 33: mod_base = OTHER; note = 2'-O-methylguanosine
  modified_base 34: mod_base = OTHER; note = 2'-fluoroadenosine
tcttcaagttacaaaagcaggtactccttgttga

SEQ ID NO: 76 - RNA, 34 nt, synthetic construct
  source 1..34: mol_type = other RNA
  modified_base 1: mod_base = OTHER; note = Phosphate 2'-O-methyluridine, wherein phosphate may be absent
  modified_base 2: mod_base = OTHER; note = 2'-fluoroadenosine
  modified_base 3: mod_base = OTHER; note = 2'-O-methyladenosine
  modified_base 4: mod_base = OTHER; note = 2'-fluoroadenosine
  modified_base 5: mod_base = OTHER; note = 2'-O-methyladenosine
  modified_base 6: mod_base = OTHER; note = 2'-fluoroguanosine
  modified_base 7: mod_base = OTHER; note = 2'-O-methylcytidine
  modified_base 8: mod_base = OTHER; note = 2'-fluoroadenosine
  modified_base 9: mod_base = OTHER; note = 2'-O-methyladenosine
  modified_base 10: mod_base = OTHER; note = 2'-fluoroadenosine
  modified_base 11: mod_base = OTHER; note = 2'-O-methyladenosine
  modified_base 12: mod_base = OTHER; note = 2'-fluorocytidine
  modified_base 13: mod_base = OTHER; note = 2'-O-methyladenosine
  modified_base 14: mod_base = OTHER; note = 2'-fluoroguanosine
  modified_base 15: mod_base = OTHER; note = 2'-O-methylguanosine
  modified_base 16: mod_base = OTHER; note = 2'-fluorouridine
  modified_base 17: mod_base = OTHER; note = 2'-O-methylcytidine
  modified_base 18: mod_base = OTHER; note = 2'-fluorouridine
  modified_base 19: mod_base = OTHER; note = 2'-O-methyladenosine
  modified_base 20: mod_base = OTHER; note = 2'-fluoroguanosine
  modified_base 21: mod_base = OTHER; note = 2'-O-methylguanosine
  modified_base 22: mod_base = OTHER; note = 2'-fluorouridine
  modified_base 23: mod_base = OTHER; note = 2'-O-methyladenosine
  modified_base 24: mod_base = OTHER; note = 2'-fluorocytidine
  modified_base 25: mod_base = OTHER; note = 2'-O-methyluridine
  modified_base 26: mod_base = OTHER; note = 2'-fluorocytidine
  modified_base 27: mod_base = OTHER; note = 2'-O-methylcytidine
  modified_base 28: mod_base = OTHER; note = 2'-fluorouridine
  modified_base 29: mod_base = OTHER; note = 2'-O-methyluridine
  modified_base 30: mod_base = OTHER; note = 2'-fluoroguanosine
  modified_base 31: mod_base = OTHER; note = 2'-O-methyluridine
  modified_base 32: mod_base = OTHER; note = 2'-fluorouridine
  modified_base 33: mod_base = OTHER; note = 2'-O-methylguanosine
  modified_base 34: mod_base = OTHER; note = 2'-fluoroadenosine
taaaagcaaaacaggtctaggtactccttgttga

SEQ ID NO: 77 - RNA, 34 nt, synthetic construct
  source 1..34: mol_type = other RNA
  modified_base 1: mod_base = OTHER; note = Phosphate 2'-O-methyluridine, wherein phosphate may be absent
  modified_base 2: mod_base = OTHER; note = 2'-fluoroadenosine
  modified_base 3: mod_base = OTHER; note = 2'-O-methylcytidine
  modified_base 4: mod_base = OTHER; note = 2'-fluoroadenosine
  modified_base 5: mod_base = OTHER; note = 2'-O-methyladenosine
  modified_base 6: mod_base = OTHER; note = 2'-fluoroadenosine
  modified_base 7: mod_base = OTHER; note = 2'-O-methyladenosine
  modified_base 8: mod_base = OTHER; note = 2'-fluoroguanosine
  modified_base 9: mod_base = OTHER; note = 2'-O-methylcytidine
  modified_base 10: mod_base = OTHER; note = 2'-fluoroadenosine
  modified_base 11: mod_base = OTHER; note = 2'-O-methyladenosine
  modified_base 12: mod_base = OTHER; note = 2'-fluoroadenosine
  modified_base 13: mod_base = OTHER; note = 2'-O-methyladenosine
  modified_base 14: mod_base = OTHER; note = 2'-fluorocytidine
  modified_base 15: mod_base = OTHER; note = 2'-O-methyladenosine
  modified_base 16: mod_base = OTHER; note = 2'-fluoroguanosine
  modified_base 17: mod_base = OTHER; note = 2'-O-methylguanosine
  modified_base 18: mod_base = OTHER; note = 2'-fluorouridine
  modified_base 19: mod_base = OTHER; note = 2'-O-methylcytidine
  modified_base 20: mod_base = OTHER; note = 2'-fluoroguanosine
  modified_base 21: mod_base = OTHER; note = 2'-O-methylguanosine
  modified_base 22: mod_base = OTHER; note = 2'-fluorouridine
  modified_base 23: mod_base = OTHER; note = 2'-O-methyladenosine
  modified_base 24: mod_base = OTHER; note = 2'-fluorocytidine
  modified_base 25: mod_base = OTHER; note = 2'-O-methyluridine
  modified_base 26: mod_base = OTHER; note = 2'-fluorocytidine
  modified_base 27: mod_base = OTHER; note = 2'-O-methylcytidine
  modified_base 28: mod_base = OTHER; note = 2'-fluorouridine
  modified_base 29: mod_base = OTHER; note = 2'-O-methyluridine
  modified_base 30: mod_base = OTHER; note = 2'-fluoroguanosine
  modified_base 31: mod_base = OTHER; note = 2'-O-methyluridine
  modified_base 32: mod_base = OTHER; note = 2'-fluorouridine
  modified_base 33: mod_base = OTHER; note = 2'-O-methylguanosine
  modified_base 34: mod_base = OTHER; note = 2'-fluoroadenosine
tacaaaagcaaaacaggtcggtactccttgttga

SEQ ID NO: 78 - RNA, 34 nt, synthetic construct
  source 1..34: mol_type = other RNA
  modified_base 1: mod_base = OTHER; note = Phosphate 2'-O-methyluridine, wherein phosphate may be absent
  modified_base 2: mod_base = OTHER; note = 2'-fluoroguanosine
  modified_base 3: mod_base = OTHER; note = 2'-O-methylcytidine
  modified_base 4: mod_base = OTHER; note = 2'-fluoroadenosine
  modified_base 5: mod_base = OTHER; note = 2'-O-methyladenosine
  modified_base 6: mod_base = OTHER; note = 2'-fluoroadenosine
  modified_base 7: mod_base = OTHER; note = 2'-O-methyladenosine
  modified_base 8: mod_base = OTHER; note = 2'-fluorocytidine
  modified_base 9: mod_base = OTHER; note = 2'-O-methyladenosine
  modified_base 10: mod_base = OTHER; note = 2'-fluoroguanosine
  modified_base 11: mod_base = OTHER; note = 2'-O-methylguanosine
  modified_base 12: mod_base = OTHER; note = 2'-fluorouridine
  modified_base 13: mod_base = OTHER; note = 2'-O-methylcytidine
  modified_base 14: mod_base = OTHER; note = 2'-fluorouridine
  modified_base 15: mod_base = OTHER; note = 2'-O-methyladenosine
  modified_base 16: mod_base = OTHER; note = 2'-fluoroguanosine
  modified_base 17: mod_base = OTHER; note = 2'-O-methyladenosine
  modified_base 18: mod_base = OTHER; note = 2'-fluoroadenosine
  modified_base 19: mod_base = OTHER; note = 2'-O-methyladenosine
  modified_base 20: mod_base = OTHER; note = 2'-fluoroguanosine
  modified_base 21: mod_base = OTHER; note = 2'-O-methylguanosine
  modified_base 22: mod_base = OTHER; note = 2'-fluorouridine
  modified_base 23: mod_base = OTHER; note = 2'-O-methyladenosine
  modified_base 24: mod_base = OTHER; note = 2'-fluorocytidine
  modified_base 25: mod_base = OTHER; note = 2'-O-methyluridine
  modified_base 26: mod_base = OTHER; note = 2'-fluorocytidine
  modified_base 27: mod_base = OTHER; note = 2'-O-methylcytidine
  modified_base 28: mod_base = OTHER; note = 2'-fluorouridine
  modified_base 29: mod_base = OTHER; note = 2'-O-methyluridine
  modified_base 30: mod_base = OTHER; note = 2'-fluoroguanosine
  modified_base 31: mod_base = OTHER; note = 2'-O-methyluridine
  modified_base 32: mod_base = OTHER; note = 2'-fluorouridine
  modified_base 33: mod_base = OTHER; note = 2'-O-methylguanosine
  modified_base 34: mod_base = OTHER; note = 2'-fluoroadenosine
tgcaaaacaggtctagaaaggtactccttgttga

SEQ ID NO: 79 - RNA, 34 nt, synthetic construct
  source 1..34: mol_type = other RNA
  modified_base 1: mod_base = OTHER; note = Phosphate 2'-O-methyluridine, wherein phosphate may be absent
  modified_base 2: mod_base = OTHER; note = 2'-fluorocytidine
  modified_base 3: mod_base = OTHER; note = 2'-O-methyladenosine
  modified_base 4: mod_base = OTHER; note = 2'-fluoroadenosine
  modified_base 5: mod_base = OTHER; note = 2'-O-methyladenosine
  modified_base 6: mod_base = OTHER; note = 2'-fluoroadenosine
  modified_base 7: mod_base = OTHER; note = 2'-O-methylguanosine
  modified_base 8: mod_base = OTHER; note = 2'-fluorocytidine
  modified_base 9: mod_base = OTHER; note = 2'-O-methyladenosine
  modified_base 10: mod_base = OTHER; note = 2'-fluoroadenosine
  modified_base 11: mod_base = OTHER; note = 2'-O-methyladenosine
  modified_base 12: mod_base = OTHER; note = 2'-fluoroadenosine
  modified_base 13: mod_base = OTHER; note = 2'-O-methylcytidine
  modified_base 14: mod_base = OTHER; note = 2'-fluoroadenosine
  modified_base 15: mod_base = OTHER; note = 2'-O-methylguanosine
  modified_base 16: mod_base = OTHER; note = 2'-fluoroguanosine
  modified_base 17: mod_base = OTHER; note = 2'-O-methyluridine
  modified_base 18: mod_base = OTHER; note = 2'-fluorocytidine
  modified_base 19: mod_base = OTHER; note = 2'-O-methyluridine
  modified_base 20: mod_base = OTHER; note = 2'-fluoroguanosine
  modified_base 21: mod_base = OTHER; note = 2'-O-methylguanosine
  modified_base 22: mod_base = OTHER; note = 2'-fluorouridine
  modified_base 23: mod_base = OTHER; note = 2'-O-methyladenosine
  modified_base 24: mod_base = OTHER; note = 2'-fluorocytidine
  modified_base 25: mod_base = OTHER; note = 2'-O-methyluridine
  modified_base 26: mod_base = OTHER; note = 2'-fluorocytidine
  modified_base 27: mod_base = OTHER; note = 2'-O-methylcytidine
  modified_base 28: mod_base = OTHER; note = 2'-fluorouridine
  modified_base 29: mod_base = OTHER; note = 2'-O-methyluridine
  modified_base 30: mod_base = OTHER; note = 2'-fluoroguanosine
  modified_base 31: mod_base = OTHER; note = 2'-O-methyluridine
  modified_base 32: mod_base = OTHER; note = 2'-fluorouridine
  modified_base 33: mod_base = OTHER; note = 2'-O-methylguanosine
  modified_base 34: mod_base = OTHER; note = 2'-fluoroadenosine
tcaaaagcaaaacaggtctggtactccttgttga

SEQ ID NO: 80 - RNA, 34 nt, synthetic construct
  source 1..34: mol_type = other RNA
  modified_base 1: mod_base = OTHER; note = Phosphate 2'-O-methyluridine, wherein phosphate may be absent
  modified_base 2: mod_base = OTHER; note = 2'-fluoroadenosine
  modified_base 3: mod_base = OTHER; note = 2'-O-methylguanosine
  modified_base 4: mod_base = OTHER; note = 2'-fluoroadenosine
  modified_base 5: mod_base = OTHER; note = 2'-O-methyladenosine
  modified_base 6: mod_base = OTHER; note = 2'-fluorouridine
  modified_base 7: mod_base = OTHER; note = 2'-O-methyladenosine
  modified_base 8: mod_base = OTHER; note = 2'-fluoroadenosine
  modified_base 9: mod_base = OTHER; note = 2'-O-methyladenosine
  modified_base 10: mod_base = OTHER; note = 2'-fluorouridine
  modified_base 11: mod_base = OTHER; note = 2'-O-methyladenosine
  modified_base 12: mod_base = OTHER; note = 2'-fluorouridine
  modified_base 13: mod_base = OTHER; note = 2'-O-methylcytidine
  modified_base 14: mod_base = OTHER; note = 2'-fluorouridine
  modified_base 15: mod_base = OTHER; note = 2'-O-methyluridine
  modified_base 16: mod_base = OTHER; note = 2'-fluorocytidine
  modified_base 17: mod_base = OTHER; note = 2'-O-methyladenosine
  modified_base 18: mod_base = OTHER; note = 2'-fluoroadenosine
  modified_base 19: mod_base = OTHER; note = 2'-O-methylguanosine
  modified_base 20: mod_base = OTHER; note = 2'-fluoroguanosine
  modified_base 21: mod_base = OTHER; note = 2'-O-methylguanosine
  modified_base 22: mod_base = OTHER; note = 2'-fluorouridine
  modified_base 23: mod_base = OTHER; note = 2'-O-methyladenosine
  modified_base 24: mod_base = OTHER; note = 2'-fluorocytidine
  modified_base 25: mod_base = OTHER; note = 2'-O-methyluridine
  modified_base 26: mod_base = OTHER; note = 2'-fluorocytidine
  modified_base 27: mod_base = OTHER; note = 2'-O-methylcytidine
  modified_base 28: mod_base = OTHER; note = 2'-fluorouridine
  modified_base 29: mod_base = OTHER; note = 2'-O-methyluridine
  modified_base 30: mod_base = OTHER; note = 2'-fluoroguanosine
  modified_base 31: mod_base = OTHER; note = 2'-O-methyluridine
  modified_base 32: mod_base = OTHER; note = 2'-fluorouridine
  modified_base 33: mod_base = OTHER; note = 2'-O-methylguanosine
  modified_base 34: mod_base = OTHER; note = 2'-fluoroadenosine
tagaataaatatcttcaagggtactccttgttga

SEQ ID NO: 81 - RNA, 34 nt, synthetic construct
  source 1..34: mol_type = other RNA
  modified_base 1: mod_base = OTHER; note = Phosphate 2'-O-methyluridine, wherein phosphate may be absent
  modified_base 2: mod_base = OTHER; note = 2'-fluoroadenosine
  modified_base 3: mod_base = OTHER; note = 2'-O-methyladenosine
  modified_base 4: mod_base = OTHER; note = 2'-fluoroadenosine
  modified_base 5: mod_base = OTHER; note = 2'-O-methylguanosine
  modified_base 6: mod_base = OTHER; note = 2'-fluorocytidine
  modified_base 7: mod_base = OTHER; note = 2'-O-methyladenosine
  modified_base 8: mod_base = OTHER; note = 2'-fluoroadenosine
  modified_base 9: mod_base = OTHER; note = 2'-O-methyladenosine
  modified_base 10: mod_base = OTHER; note = 2'-fluoroadenosine
  modified_base 11: mod_base = OTHER; note = 2'-O-methylcytidine
  modified_base 12: mod_base = OTHER; note = 2'-fluoroadenosine
  modified_base 13: mod_base = OTHER; note = 2'-O-methylguanosine
  modified_base 14: mod_base = OTHER; note = 2'-fluoroguanosine
  modified_base 15: mod_base = OTHER; note = 2'-O-methyluridine
  modified_base 16: mod_base = OTHER; note = 2'-fluorocytidine
  modified_base 17: mod_base = OTHER; note = 2'-O-methyluridine
  modified_base 18: mod_base = OTHER; note = 2'-fluoroadenosine
  modified_base 19: mod_base = OTHER; note = 2'-O-methylguanosine
  modified_base 20: mod_base = OTHER; note = 2'-fluoroguanosine
  modified_base 21: mod_base = OTHER; note = 2'-O-methylguanosine
  modified_base 22: mod_base = OTHER; note = 2'-fluorouridine
  modified_base 23: mod_base = OTHER; note = 2'-O-methyladenosine
  modified_base 24: mod_base = OTHER; note = 2'-fluorocytidine
  modified_base 25: mod_base = OTHER; note = 2'-O-methyluridine
  modified_base 26: mod_base = OTHER; note = 2'-fluorocytidine
  modified_base 27: mod_base = OTHER; note = 2'-O-methylcytidine
  modified_base 28: mod_base = OTHER; note = 2'-fluorouridine
  modified_base 29: mod_base = OTHER; note = 2'-O-methyluridine
  modified_base 30: mod_base = OTHER; note = 2'-fluoroguanosine
  modified_base 31: mod_base = OTHER; note = 2'-O-methyluridine
  modified_base 32: mod_base = OTHER; note = 2'-fluorouridine
  modified_base 33: mod_base = OTHER; note = 2'-O-methylguanosine
  modified_base 34: mod_base = OTHER; note = 2'-fluoroadenosine
taaagcaaaacaggtctagggtactccttgttga

SEQ ID NO: 82 - RNA, 34 nt, synthetic construct
  source 1..34: mol_type = other RNA
  modified_base 1: mod_base = OTHER; note = Phosphate 2'-O-methyluridine, wherein phosphate may be absent
  modified_base 2: mod_base = OTHER; note = 2'-fluorocytidine
  modified_base 3: mod_base = OTHER; note = 2'-O-methyluridine
  modified_base 4: mod_base = OTHER; note = 2'-fluorouridine
  modified_base 5: mod_base = OTHER; note = 2'-O-methylcytidine
  modified_base 6: mod_base = OTHER; note = 2'-fluoroadenosine
  modified_base 7: mod_base = OTHER; note = 2'-O-methyladenosine
  modified_base 8: mod_base = OTHER; note = 2'-fluoroguanosine
  modified_base 9: mod_base = OTHER; note = 2'-O-methyluridine
  modified_base 10: mod_base = OTHER; note = 2'-fluorouridine
  modified_base 11: mod_base = OTHER; note = 2'-O-methyladenosine
  modified_base 12: mod_base = OTHER; note = 2'-fluorocytidine
  modified_base 13: mod_base = OTHER; note = 2'-O-methyladenosine
  modified_base 14: mod_base = OTHER; note = 2'-fluoroadenosine
  modified_base 15: mod_base = OTHER; note = 2'-O-methyladenosine
  modified_base 16: mod_base = OTHER; note = 2'-fluoroadenosine
  modified_base 17: mod_base = OTHER; note = 2'-O-methylguanosine
  modified_base 18: mod_base = OTHER; note = 2'-fluorocytidine
  modified_base 19: mod_base = OTHER; note = 2'-O-methyladenosine
  modified_base 20: mod_base = OTHER; note = 2'-fluorouridine
  modified_base 21: mod_base = OTHER; note = 2'-O-methyladenosine
  modified_base 22: mod_base = OTHER; note = 2'-fluoroadenosine
  modified_base 23: mod_base = OTHER; note = 2'-O-methyladenosine
  modified_base 24: mod_base = OTHER; note = 2'-fluoroguanosine
  modified_base 25: mod_base = OTHER; note = 2'-O-methylcytidine
  modified_base 26: mod_base = OTHER; note = 2'-fluorouridine
  modified_base 27: mod_base = OTHER; note = 2'-O-methylguanosine
  modified_base 28: mod_base = OTHER; note = 2'-fluoroguanosine
  modified_base 29: mod_base = OTHER; note = 2'-O-methyladenosine
  modified_base 30: mod_base = OTHER; note = 2'-fluorocytidine
  modified_base 31: mod_base = OTHER; note = 2'-O-methyladenosine
  modified_base 32: mod_base = OTHER; note = 2'-fluoroadenosine
  modified_base 33: mod_base = OTHER; note = 2'-O-methylguanosine
  modified_base 34: mod_base = OTHER; note = 2'-fluoroadenosine
tcttcaagttacaaaagcataaagctggacaaga

SEQ ID NO: 83 - RNA, 34 nt, synthetic construct
  source 1..34: mol_type = other RNA
  modified_base 1: mod_base = OTHER; note = Phosphate 2'-O-methyluridine, wherein phosphate may be absent
  modified_base 2: mod_base = OTHER; note = 2'-fluoroadenosine
  modified_base 3: mod_base = OTHER; note = 2'-O-methyladenosine
  modified_base 4: mod_base = OTHER; note = 2'-fluoroadenosine
  modified_base 5: mod_base = OTHER; note = 2'-O-methyladenosine
  modified_base 6: mod_base = OTHER; note = 2'-fluoroguanosine
  modified_base 7: mod_base = OTHER; note = 2'-O-methylcytidine
  modified_base 8: mod_base = OTHER; note = 2'-fluoroadenosine
  modified_base 9: mod_base = OTHER; note = 2'-O-methyladenosine
  modified_base 10: mod_base = OTHER; note = 2'-fluoroadenosine
  modified_base 11: mod_base = OTHER; note = 2'-O-methyladenosine
  modified_base 12: mod_base = OTHER; note = 2'-fluorocytidine
  modified_base 13: mod_base = OTHER; note = 2'-O-methyladenosine
  modified_base 14: mod_base = OTHER; note = 2'-fluoroguanosine
  modified_base 15: mod_base = OTHER; note = 2'-O-methylguanosine
  modified_base 16: mod_base = OTHER; note = 2'-fluorouridine
  modified_base 17: mod_base = OTHER; note = 2'-O-methylcytidine
  modified_base 18: mod_base = OTHER; note = 2'-fluorouridine
  modified_base 19: mod_base = OTHER; note = 2'-O-methyladenosine
  modified_base 20: mod_base = OTHER; note = 2'-fluorouridine
  modified_base 21: mod_base = OTHER; note = 2'-O-methyladenosine
  modified_base 22: mod_base = OTHER; note = 2'-fluoroadenosine
  modified_base 23: mod_base = OTHER; note = 2'-O-methyladenosine
  modified_base 24: mod_base = OTHER; note = 2'-fluoroguanosine
  modified_base 25: mod_base = OTHER; note = 2'-O-methylcytidine
  modified_base 26: mod_base = OTHER; note = 2'-fluorouridine
  modified_base 27: mod_base = OTHER; note = 2'-O-methylguanosine
  modified_base 28: mod_base = OTHER; note = 2'-fluoroguanosine
  modified_base 29: mod_base = OTHER; note = 2'-O-methyladenosine
  modified_base 30: mod_base = OTHER; note = 2'-fluorocytidine
  modified_base 31: mod_base = OTHER; note = 2'-O-methyladenosine
  modified_base 32: mod_base = OTHER; note = 2'-fluoroadenosine
  modified_base 33: mod_base = OTHER; note = 2'-O-methylguanosine
  modified_base 34: mod_base = OTHER; note = 2'-fluoroadenosine
taaaagcaaaacaggtctataaagctggacaaga

SEQ ID NO: 84 - RNA, 34 nt, synthetic construct
  source 1..34: mol_type = other RNA
  modified_base 1: mod_base = OTHER; note = Phosphate 2'-O-methyluridine, wherein phosphate may be absent
  modified_base 2: mod_base = OTHER; note = 2'-fluoroadenosine
  modified_base 3: mod_base = OTHER; note = 2'-O-methylcytidine
  modified_base 4: mod_base = OTHER; note = 2'-fluoroadenosine
  modified_base 5: mod_base = OTHER; note = 2'-O-methyladenosine
  modified_base 6: mod_base = OTHER; note = 2'-fluoroadenosine
  modified_base 7: mod_base = OTHER; note = 2'-O-methyladenosine
  modified_base 8: mod_base = OTHER; note = 2'-fluoroguanosine
  modified_base 9: mod_base = OTHER; note = 2'-O-methylcytidine
  modified_base 10: mod_base = OTHER; note = 2'-fluoroadenosine
  modified_base 11: mod_base = OTHER; note = 2'-O-methyladenosine
  modified_base 12: mod_base = OTHER; note = 2'-fluoroadenosine
  modified_base 13: mod_base = OTHER; note = 2'-O-methyladenosine
  modified_base 14: mod_base = OTHER; note = 2'-fluorocytidine
  modified_base 15: mod_base = OTHER; note = 2'-O-methyladenosine
  modified_base 16: mod_base = OTHER; note = 2'-fluoroguanosine
  modified_base 17: mod_base = OTHER; note = 2'-O-methylguanosine
  modified_base 18: mod_base = OTHER; note = 2'-fluorouridine
  modified_base 19: mod_base = OTHER; note = 2'-O-methylcytidine
  modified_base 20: mod_base = OTHER; note = 2'-fluorouridine
  modified_base 21: mod_base = OTHER; note = 2'-O-methyladenosine
  modified_base 22: mod_base = OTHER; note = 2'-fluoroadenosine
  modified_base 23: mod_base = OTHER; note = 2'-O-methyladenosine
  modified_base 24: mod_base = OTHER; note = 2'-fluoroguanosine
  modified_base 25: mod_base = OTHER; note = 2'-O-methylcytidine
  modified_base 26: mod_base = OTHER; note = 2'-fluorouridine
  modified_base 27: mod_base = OTHER; note = 2'-O-methylguanosine
  modified_base 28: mod_base = OTHER; note = 2'-fluoroguanosine
  modified_base 29: mod_base = OTHER; note = 2'-O-methyladenosine
  modified_base 30: mod_base = OTHER; note = 2'-fluorocytidine
  modified_base 31: mod_base = OTHER; note = 2'-O-methyladenosine
  modified_base 32: mod_base = OTHER; note = 2'-fluoroadenosine
  modified_base 33: mod_base = OTHER; note = 2'-O-methylguanosine
  modified_base 34: mod_base = OTHER; note = 2'-fluoroadenosine
tacaaaagcaaaacaggtctaaagctggacaaga

SEQ ID NO: 85 - RNA, 34 nt, synthetic construct
  source 1..34: mol_type = other RNA
  modified_base 1: mod_base = OTHER; note = Phosphate 2'-O-methyluridine, wherein phosphate may be absent
  modified_base 2: mod_base = OTHER; note = 2'-fluoroguanosine
  modified_base 3: mod_base = OTHER; note = 2'-O-methylcytidine
  modified_base 4: mod_base = OTHER; note = 2'-fluoroadenosine
  modified_base 5: mod_base = OTHER; note = 2'-O-methyladenosine
  modified_base 6: mod_base = OTHER; note = 2'-fluoroadenosine
  modified_base 7: mod_base = OTHER; note = 2'-O-methyladenosine
  modified_base 8: mod_base = OTHER; note = 2'-fluorocytidine
  modified_base 9: mod_base = OTHER; note = 2'-O-methyladenosine
  modified_base 10: mod_base = OTHER; note = 2'-fluoroguanosine
  modified_base 11: mod_base = OTHER; note = 2'-O-methylguanosine
  modified_base 12: mod_base = OTHER; note = 2'-fluorouridine
  modified_base 13: mod_base = OTHER; note = 2'-O-methylcytidine
  modified_base 14: mod_base = OTHER; note = 2'-fluorouridine
  modified_base 15: mod_base = OTHER; note = 2'-O-methyladenosine
  modified_base 16: mod_base = OTHER; note = 2'-fluoroguanosine
  modified_base 17: mod_base = OTHER; note = 2'-O-methyladenosine
  modified_base 18: mod_base = OTHER; note = 2'-fluoroadenosine
  modified_base 19: mod_base = OTHER; note = 2'-O-methyladenosine
  modified_base 20: mod_base = OTHER; note = 2'-fluorouridine
  modified_base 21: mod_base = OTHER; note = 2'-O-methyladenosine
  modified_base 22: mod_base = OTHER; note = 2'-fluoroadenosine
  modified_base 23: mod_base = OTHER; note = 2'-O-methyladenosine
  modified_base 24: mod_base = OTHER; note = 2'-fluoroguanosine
  modified_base 25: mod_base = OTHER; note = 2'-O-methylcytidine
  modified_base 26: mod_base = OTHER; note = 2'-fluorouridine
  modified_base 27: mod_base = OTHER; note = 2'-O-methylguanosine
  modified_base 28: mod_base = OTHER; note = 2'-fluoroguanosine
  modified_base 29: mod_base = OTHER; note = 2'-O-methyladenosine
  modified_base 30: mod_base = OTHER; note = 2'-fluorocytidine
  modified_base 31: mod_base = OTHER; note = 2'-O-methyladenosine
  modified_base 32: mod_base = OTHER; note = 2'-fluoroadenosine
  modified_base 33: mod_base = OTHER; note = 2'-O-methylguanosine
  modified_base 34: mod_base = OTHER; note = 2'-fluoroadenosine
tgcaaaacaggtctagaaataaagctggacaaga

SEQ ID NO: 86 - RNA, 34 nt, synthetic construct
  source 1..34: mol_type = other RNA
  modified_base 1: mod_base = OTHER; note = Phosphate 2'-O-methyluridine, wherein phosphate may be absent
  modified_base 2: mod_base = OTHER; note = 2'-fluorocytidine
  modified_base 3: mod_base = OTHER; note = 2'-O-methyladenosine
  modified_base 4: mod_base = OTHER; note = 2'-fluoroadenosine
  modified_base 5: mod_base = OTHER; note = 2'-O-methyladenosine
  modified_base 6: mod_base = OTHER; note = 2'-fluoroadenosine
  modified_base 7: mod_base = OTHER; note = 2'-O-methylguanosine
  modified_base 8: mod_base = OTHER; note = 2'-fluorocytidine
  modified_base 9: mod_base = OTHER; note = 2'-O-methyladenosine
  modified_base 10: mod_base = OTHER; note = 2'-fluoroadenosine
  modified_base 11: mod_base = OTHER; note = 2'-O-methyladenosine
  modified_base 12: mod_base = OTHER; note = 2'-fluoroadenosine
  modified_base 13: mod_base = OTHER; note = 2'-O-methylcytidine
  modified_base 14: mod_base = OTHER; note = 2'-fluoroadenosine
  modified_base 15: mod_base = OTHER; note = 2'-O-methylguanosine
  modified_base 16: mod_base = OTHER; note = 2'-fluoroguanosine
  modified_base 17: mod_base = OTHER; note = 2'-O-methyluridine
  modified_base 18: mod_base = OTHER; note = 2'-fluorocytidine
  modified_base 19: mod_base = OTHER; note = 2'-O-methyluridine
  modified_base 20: mod_base = OTHER; note = 2'-fluorouridine
  modified_base 21: mod_base = OTHER; note = 2'-O-methyladenosine
  modified_base 22: mod_base = OTHER; note = 2'-fluoroadenosine
  modified_base 23: mod_base = OTHER; note = 2'-O-methyladenosine
  modified_base 24: mod_base = OTHER; note = 2'-fluoroguanosine
  modified_base 25: mod_base = OTHER; note = 2'-O-methylcytidine
  modified_base 26: mod_base = OTHER; note = 2'-fluorouridine
  modified_base 27: mod_base = OTHER; note = 2'-O-methylguanosine
  modified_base 28: mod_base = OTHER; note = 2'-fluoroguanosine
  modified_base 29: mod_base = OTHER; note = 2'-O-methyladenosine
  modified_base 30: mod_base = OTHER; note = 2'-fluorocytidine
  modified_base 31: mod_base = OTHER; note = 2'-O-methyladenosine
  modified_base 32: mod_base = OTHER; note = 2'-fluoroadenosine
  modified_base 33: mod_base = OTHER; note = 2'-O-methylguanosine
  modified_base 34: mod_base = OTHER; note = 2'-fluoroadenosine
tcaaaagcaaaacaggtcttaaagctggacaaga

SEQ ID NO: 87 - RNA, 34 nt, synthetic construct
  source 1..34: mol_type = other RNA
  modified_base 1: mod_base = OTHER; note = Phosphate 2'-O-methyluridine, wherein phosphate may be absent
  modified_base 2: mod_base = OTHER; note = 2'-fluoroadenosine
  modified_base 3: mod_base = OTHER; note = 2'-O-methylguanosine
  modified_base 4: mod_base = OTHER; note = 2'-fluoroadenosine
  modified_base 5: mod_base = OTHER; note = 2'-O-methyladenosine
  modified_base 6: mod_base = OTHER; note = 2'-fluorouridine
  modified_base 7: mod_base = OTHER; note = 2'-O-methyladenosine
  modified_base 8: mod_base = OTHER; note = 2'-fluoroadenosine
  modified_base 9: mod_base = OTHER; note = 2'-O-methyladenosine
  modified_base 10: mod_base = OTHER; note = 2'-fluorouridine
  modified_base 11: mod_base = OTHER; note = 2'-O-methyladenosine
  modified_base 12: mod_base = OTHER; note = 2'-fluorouridine
  modified_base 13: mod_base = OTHER; note = 2'-O-methylcytidine
  modified_base 14: mod_base = OTHER; note = 2'-fluorouridine
  modified_base 15: mod_base = OTHER; note = 2'-O-methyluridine
  modified_base 16: mod_base = OTHER; note = 2'-fluorocytidine
  modified_base 17: mod_base = OTHER; note = 2'-O-methyladenosine
  modified_base 18: mod_base = OTHER; note = 2'-fluoroadenosine
  modified_base 19: mod_base = OTHER; note = 2'-O-methylguanosine
  modified_base 20: mod_base = OTHER; note = 2'-fluorouridine
  modified_base 21: mod_base = OTHER; note = 2'-O-methyladenosine
  modified_base 22: mod_base = OTHER; note = 2'-fluoroadenosine
  modified_base 23: mod_base = OTHER; note = 2'-O-methyladenosine
  modified_base 24: mod_base = OTHER; note = 2'-fluoroguanosine
  modified_base 25: mod_base = OTHER; note = 2'-O-methylcytidine
  modified_base 26: mod_base = OTHER; note = 2'-fluorouridine
  modified_base 27: mod_base = OTHER; note = 2'-O-methylguanosine
  modified_base 28: mod_base = OTHER; note = 2'-fluoroguanosine
  modified_base 29: mod_base = OTHER; note = 2'-O-methyladenosine
  modified_base 30: mod_base = OTHER; note = 2'-fluorocytidine
  modified_base 31: mod_base = OTHER; note = 2'-O-methyladenosine
  modified_base 32: mod_base = OTHER; note = 2'-fluoroadenosine
  modified_base 33: mod_base = OTHER; note = 2'-O-methylguanosine
  modified_base 34: mod_base = OTHER; note = 2'-fluoroadenosine
tagaataaatatcttcaagtaaagctggacaaga

SEQ ID NO: 88 - RNA, 34 nt, synthetic construct
  source 1..34: mol_type = other RNA
  modified_base 1: mod_base = OTHER; note = Phosphate 2'-O-methyluridine, wherein phosphate may be absent
  modified_base 2: mod_base = OTHER; note = 2'-fluoroadenosine
  modified_base 3: mod_base = OTHER; note = 2'-O-methyladenosine
  modified_base 4: mod_base = OTHER; note = 2'-fluoroadenosine
  modified_base 5: mod_base = OTHER; note = 2'-O-methylguanosine
  modified_base 6: mod_base = OTHER; note = 2'-fluorocytidine
  modified_base 7: mod_base = OTHER; note = 2'-O-methyladenosine
  modified_base 8: mod_base = OTHER; note = 2'-fluoroadenosine
  modified_base 9: mod_base = OTHER; note = 2'-O-methyladenosine
  modified_base 10: mod_base = OTHER; note = 2'-fluoroadenosine
  modified_base 11: mod_base = OTHER; note = 2'-O-methylcytidine
  modified_base 12: mod_base = OTHER; note = 2'-fluoroadenosine
  modified_base 13: mod_base = OTHER; note = 2'-O-methylguanosine
  modified_base 14: mod_base = OTHER; note = 2'-fluoroguanosine
  modified_base 15: mod_base = OTHER; note = 2'-O-methyluridine
  modified_base 16: mod_base = OTHER; note = 2'-fluorocytidine
  modified_base 17: mod_base = OTHER; note = 2'-O-methyluridine
  modified_base 18: mod_base = OTHER; note = 2'-fluoroadenosine
  modified_base 19: mod_base = OTHER; note = 2'-O-methylguanosine
  modified_base 20: mod_base = OTHER; note = 2'-fluorouridine
  modified_base 21: mod_base = OTHER; note = 2'-O-methyladenosine
  modified_base 22: mod_base = OTHER; note = 2'-fluoroadenosine
  modified_base 23: mod_base = OTHER; note = 2'-O-methyladenosine
  modified_base 24: mod_base = OTHER; note = 2'-fluoroguanosine
  modified_base 25: mod_base = OTHER; note = 2'-O-methylcytidine
  modified_base 26: mod_base = OTHER; note = 2'-fluorouridine
  modified_base 27: mod_base = OTHER; note = 2'-O-methylguanosine
  modified_base 28: mod_base = OTHER; note = 2'-fluoroguanosine
  modified_base 29: mod_base = OTHER; note = 2'-O-methyladenosine
  modified_base 30: mod_base = OTHER; note = 2'-fluorocytidine
  modified_base 31: mod_base = OTHER; note = 2'-O-methyladenosine
  modified_base 32: mod_base = OTHER; note = 2'-fluoroadenosine
  modified_base 33: mod_base = OTHER; note = 2'-O-methylguanosine
  modified_base 34: mod_base = OTHER; note = 2'-fluoroadenosine
taaagcaaaacaggtctagtaaagctggacaaga

SEQ ID NO: 89 - RNA, 34 nt, synthetic construct
  source 1..34: mol_type = other RNA
  modified_base 1: mod_base = OTHER; note = Phosphate 2'-O-methyluridine, wherein phosphate may be absent
  modified_base 2: mod_base = OTHER; note = 2'-fluorocytidine
  modified_base 3: mod_base = OTHER; note = 2'-O-methyluridine
  modified_base 4: mod_base = OTHER; note = 2'-fluorouridine
  modified_base 5: mod_base = OTHER; note = 2'-O-methylcytidine
  modified_base 6: mod_base = OTHER; note = 2'-fluoroadenosine
  modified_base 7: mod_base = OTHER; note = 2'-O-methyladenosine
  modified_base 8: mod_base = OTHER; note = 2'-fluoroguanosine
  modified_base 9: mod_base = OTHER; note = 2'-O-methyluridine
  modified_base 10: mod_base = OTHER; note = 2'-fluorouridine
  modified_base 11: mod_base = OTHER; note = 2'-O-methyladenosine
  modified_base 12: mod_base = OTHER; note = 2'-fluorocytidine
  modified_base 13: mod_base = OTHER; note = 2'-O-methyladenosine
  modified_base 14: mod_base = OTHER; note = 2'-fluoroadenosine
  modified_base 15: mod_base = OTHER; note = 2'-O-methyladenosine
  modified_base 16: mod_base = OTHER; note = 2'-fluoroadenosine
  modified_base 17: mod_base = OTHER; note = 2'-O-methylguanosine
  modified_base 18: mod_base = OTHER; note = 2'-fluorocytidine
  modified_base 19: mod_base = OTHER; note = 2'-O-methyladenosine
  modified_base 20: mod_base = OTHER; note = 2'-fluorocytidine
  modified_base 21: mod_base = OTHER; note = 2'-O-methylcytidine
  modified_base 22: mod_base = OTHER; note = 2'-fluoroadenosine
  modified_base 23: mod_base = OTHER; note = 2'-O-methyladenosine
  modified_base 24: mod_base = OTHER; note = 2'-fluorouridine
  modified_base 25: mod_base = OTHER; note = 2'-O-methyladenosine
  modified_base 26: mod_base = OTHER; note = 2'-fluoroadenosine
  modified_base 27: mod_base = OTHER; note = 2'-O-methyladenosine
  modified_base 28: mod_base = OTHER; note = 2'-fluoroguanosine
  modified_base 29: mod_base = OTHER; note = 2'-O-methylcytidine
  modified_base 30: mod_base = OTHER; note = 2'-fluorouridine
  modified_base 31: mod_base = OTHER; note = 2'-O-methylguanosine
  modified_base 32: mod_base = OTHER; note = 2'-fluoroguanosine
  modified_base 33: mod_base = OTHER; note = 2'-O-methyladenosine
  modified_base 34: mod_base = OTHER; note = 2'-fluoroadenosine
tcttcaagttacaaaagcaccaataaagctggaa

SEQ ID NO: 90 - RNA, 34 nt, synthetic construct
  source 1..34: mol_type = other RNA
  modified_base 1: mod_base = OTHER; note = Phosphate 2'-O-methyluridine, wherein phosphate may be absent
  modified_base 2: mod_base = OTHER; note = 2'-fluoroadenosine
  modified_base 3: mod_base = OTHER; note = 2'-O-methyladenosine
  modified_base 4: mod_base = OTHER; note = 2'-fluoroadenosine
  modified_base 5: mod_base = OTHER; note = 2'-O-methyladenosine
  modified_base 6: mod_base = OTHER; note = 2'-fluoroguanosine
  modified_base 7: mod_base = OTHER; note = 2'-O-methylcytidine
  modified_base 8: mod_base = OTHER; note = 2'-fluoroadenosine
  modified_base 9: mod_base = OTHER; note = 2'-O-methyladenosine
  modified_base 10: mod_base = OTHER; note = 2'-fluoroadenosine
  modified_base 11: mod_base = OTHER; note = 2'-O-methyladenosine
  modified_base 12: mod_base = OTHER; note = 2'-fluorocytidine
  modified_base 13: mod_base = OTHER; note = 2'-O-methyladenosine
  modified_base 14: mod_base = OTHER; note = 2'-fluoroguanosine
  modified_base 15: mod_base = OTHER; note = 2'-O-methylguanosine
  modified_base 16: mod_base = OTHER; note = 2'-fluorouridine
  modified_base 17: mod_base = OTHER; note = 2'-O-methylcytidine
  modified_base 18: mod_base = OTHER; note = 2'-fluorouridine
  modified_base 19: mod_base = OTHER; note = 2'-O-methyladenosine
  modified_base 20: mod_base = OTHER; note = 2'-fluorocytidine
  modified_base 21: mod_base = OTHER; note = 2'-O-methylcytidine
  modified_base 22: mod_base = OTHER; note = 2'-fluoroadenosine
  modified_base 23: mod_base = OTHER; note = 2'-O-methyladenosine
  modified_base 24: mod_base = OTHER; note = 2'-fluorouridine
  modified_base 25: mod_base = OTHER; note = 2'-O-methyladenosine
  modified_base 26: mod_base = OTHER; note = 2'-fluoroadenosine
  modified_base 27: mod_base = OTHER; note = 2'-O-methyladenosine
  modified_base 28: mod_base = OTHER; note = 2'-fluoroguanosine
  modified_base 29: mod_base = OTHER; note = 2'-O-methylcytidine
  modified_base 30: mod_base = OTHER; note = 2'-fluorouridine
  modified_base 31: mod_base = OTHER; note = 2'-O-methylguanosine
  modified_base 32: mod_base = OTHER; note = 2'-fluoroguanosine
  modified_base 33: mod_base = OTHER; note = 2'-O-methyladenosine
  modified_base 34: mod_base = OTHER; note = 2'-fluoroadenosine
taaaagcaaaacaggtctaccaataaagctggaa

SEQ ID NO: 91 - RNA, 34 nt, synthetic construct
  source 1..34: mol_type = other RNA
  modified_base 1: mod_base = OTHER; note = Phosphate 2'-O-methyluridine, wherein phosphate may be absent
  modified_base 2: mod_base = OTHER; note = 2'-fluoroadenosine
  modified_base 3: mod_base = OTHER; note = 2'-O-methylcytidine
  modified_base 4: mod_base = OTHER; note = 2'-fluoroadenosine
  modified_base 5: mod_base = OTHER; note = 2'-O-methyladenosine
  modified_base 6: mod_base = OTHER; note = 2'-fluoroadenosine
  modified_base 7: mod_base = OTHER; note = 2'-O-methyladenosine
  modified_base 8: mod_base = OTHER; note = 2'-fluoroguanosine
  modified_base 9: mod_base = OTHER; note = 2'-O-methylcytidine
  modified_base 10: mod_base = OTHER; note = 2'-fluoroadenosine
  modified_base 11: mod_base = OTHER; note = 2'-O-methyladenosine
  modified_base 12: mod_base = OTHER; note = 2'-fluoroadenosine
  modified_base 13: mod_base = OTHER; note = 2'-O-methyladenosine
  modified_base 14: mod_base = OTHER; note = 2'-fluorocytidine
  modified_base 15: mod_base = OTHER; note = 2'-O-methyladenosine
  modified_base 16: mod_base = OTHER; note = 2'-fluoroguanosine
  modified_base 17: mod_base = OTHER; note = 2'-O-methylguanosine
  modified_base 18: mod_base = OTHER; note = 2'-fluorouridine
  modified_base 19: mod_base = OTHER; note = 2'-O-methylcytidine
  modified_base 20: mod_base = OTHER; note = 2'-fluorocytidine
  modified_base 21: mod_base = OTHER; note = 2'-O-methylcytidine
  modified_base 22: mod_base = OTHER; note = 2'-fluoroadenosine
  modified_base 23: mod_base = OTHER; note = 2'-O-methyladenosine
  modified_base 24: mod_base = OTHER; note = 2'-fluorouridine
  modified_base 25: mod_base = OTHER; note = 2'-O-methyladenosine
  modified_base 26: mod_base = OTHER; note = 2'-fluoroadenosine
  modified_base 27: mod_base = OTHER; note = 2'-O-methyladenosine
  modified_base 28: mod_base = OTHER; note = 2'-fluoroguanosine
  modified_base 29: mod_base = OTHER; note = 2'-O-methylcytidine
  modified_base 30: mod_base = OTHER; note = 2'-fluorouridine
  modified_base 31: mod_base = OTHER; note = 2'-O-methylguanosine
  modified_base 32: mod_base = OTHER; note = 2'-fluoroguanosine
  modified_base 33: mod_base = OTHER; note = 2'-O-methyladenosine
  modified_base 34: mod_base = OTHER; note = 2'-fluoroadenosine
tacaaaagcaaaacaggtcccaataaagctggaa

SEQ ID NO: 92 - RNA, 34 nt, synthetic construct
  source 1..34: mol_type = other RNA
  modified_base 1: mod_base = OTHER; note = Phosphate 2'-O-methyluridine, wherein phosphate may be absent
  modified_base 2: mod_base = OTHER; note = 2'-fluoroguanosine
  modified_base 3: mod_base = OTHER; note = 2'-O-methylcytidine
  modified_base 4: mod_base = OTHER; note = 2'-fluoroadenosine
  modified_base 5: mod_base = OTHER; note = 2'-O-methyladenosine
  modified_base 6: mod_base = OTHER; note = 2'-fluoroadenosine
  modified_base 7: mod_base = OTHER; note = 2'-O-methyladenosine
  modified_base 8: mod_base = OTHER; note = 2'-fluorocytidine
  modified_base 9: mod_base = OTHER; note = 2'-O-methyladenosine
  modified_base 10: mod_base = OTHER; note = 2'-fluoroguanosine
  modified_base 11: mod_base = OTHER; note = 2'-O-methylguanosine
  modified_base 12: mod_base = OTHER; note = 2'-fluorouridine
  modified_base 13: mod_base = OTHER; note = 2'-O-methylcytidine
  modified_base 14: mod_base = OTHER; note = 2'-fluorouridine
  modified_base 15: mod_base = OTHER; note = 2'-O-methyladenosine
  modified_base 16: mod_base = OTHER; note = 2'-fluoroguanosine
  modified_base 17: mod_base = OTHER; note = 2'-O-methyladenosine
  modified_base 18: mod_base = OTHER; note = 2'-fluoroadenosine
  modified_base 19: mod_base = OTHER; note = 2'-O-methyladenosine
  modified_base 20: mod_base = OTHER; note = 2'-fluorocytidine
  modified_base 21: mod_base = OTHER; note = 2'-O-methylcytidine
  modified_base 22: mod_base = OTHER; note = 2'-fluoroadenosine
  modified_base 23: mod_base = OTHER; note = 2'-O-methyladenosine
  modified_base 24: mod_base = OTHER; note = 2'-fluorouridine
  modified_base 25: mod_base = OTHER; note = 2'-O-methyladenosine
  modified_base 26: mod_base = OTHER; note = 2'-fluoroadenosine
  modified_base 27: mod_base = OTHER; note = 2'-O-methyladenosine
  modified_base 28: mod_base = OTHER; note = 2'-fluoroguanosine
  modified_base 29: mod_base = OTHER; note = 2'-O-methylcytidine
  modified_base 30: mod_base = OTHER; note = 2'-fluorouridine
  modified_base 31: mod_base = OTHER; note = 2'-O-methylguanosine
  modified_base 32: mod_base = OTHER; note = 2'-fluoroguanosine
  modified_base 33: mod_base = OTHER; note = 2'-O-methyladenosine
  modified_base 34: mod_base = OTHER; note = 2'-fluoroadenosine
tgcaaaacaggtctagaaaccaataaagctggaa

SEQ ID NO: 93 - RNA, 34 nt, synthetic construct
  source 1..34: mol_type = other RNA
  modified_base 1: mod_base = OTHER; note = Phosphate 2'-O-methyluridine, wherein phosphate may be absent
  modified_base 2: mod_base = OTHER; note = 2'-fluorocytidine
  modified_base 3: mod_base = OTHER; note = 2'-O-methyladenosine
  modified_base 4: mod_base = OTHER; note = 2'-fluoroadenosine
  modified_base 5: mod_base = OTHER; note = 2'-O-methyladenosine
  modified_base 6: mod_base = OTHER; note = 2'-fluoroadenosine
  modified_base 7: mod_base = OTHER; note = 2'-O-methylguanosine
  modified_base 8: mod_base = OTHER; note = 2'-fluorocytidine
  modified_base 9: mod_base = OTHER; note = 2'-O-methyladenosine
  modified_base 10: mod_base = OTHER; note = 2'-fluoroadenosine
  modified_base 11: mod_base = OTHER; note = 2'-O-methyladenosine
  modified_base 12: mod_base = OTHER; note = 2'-fluoroadenosine
  modified_base 13: mod_base = OTHER; note = 2'-O-methylcytidine
  modified_base 14: mod_base = OTHER; note = 2'-fluoroadenosine
  modified_base 15: mod_base = OTHER; note = 2'-O-methylguanosine
  modified_base 16: mod_base = OTHER; note = 2'-fluoroguanosine
  modified_base 17: mod_base = OTHER; note = 2'-O-methyluridine
  modified_base 18: mod_base = OTHER; note = 2'-fluorocytidine
  modified_base 19: mod_base = OTHER; note = 2'-O-methyluridine
  modified_base 20: mod_base = OTHER; note = 2'-fluorocytidine
  modified_base 21: mod_base = OTHER; note = 2'-O-methylcytidine
  modified_base 22: mod_base = OTHER; note = 2'-fluoroadenosine
  modified_base 23: mod_base = OTHER; note = 2'-O-methyladenosine
  modified_base 24: mod_base = OTHER; note = 2'-fluorouridine
  modified_base 25: mod_base = OTHER; note = 2'-O-methyladenosine
  modified_base 26: mod_base = OTHER; note = 2'-fluoroadenosine
  modified_base 27: mod_base = OTHER; note = 2'-O-methyladenosine
  modified_base 28: mod_base = OTHER; note = 2'-fluoroguanosine
  modified_base 29: mod_base = OTHER; note = 2'-O-methylcytidine
  modified_base 30: mod_base = OTHER; note = 2'-fluorouridine
  modified_base 31: mod_base = OTHER; note = 2'-O-methylguanosine
  modified_base 32: mod_base = OTHER; note = 2'-fluoroguanosine
  modified_base 33: mod_base = OTHER; note = 2'-O-methyladenosine
  modified_base 34: mod_base = OTHER; note = 2'-fluoroadenosine
tcaaaagcaaaacaggtctccaataaagctggaa

SEQ ID NO: 94 - RNA, 34 nt, synthetic construct
  source 1..34: mol_type = other RNA
  modified_base 1: mod_base = OTHER; note = Phosphate 2'-O-methyluridine, wherein phosphate may be absent
  modified_base 2: mod_base = OTHER; note = 2'-fluoroadenosine
  modified_base 3: mod_base = OTHER; note = 2'-O-methylguanosine
  modified_base 4: mod_base = OTHER; note = 2'-fluoroadenosine
  modified_base 5: mod_base = OTHER; note = 2'-O-methyladenosine
  modified_base 6: mod_base = OTHER; note = 2'-fluorouridine
  modified_base 7: mod_base = OTHER; note = 2'-O-methyladenosine
  modified_base 8: mod_base = OTHER; note = 2'-fluoroadenosine
  modified_base 9: mod_base = OTHER; note = 2'-O-methyladenosine
  modified_base 10: mod_base = OTHER; note = 2'-fluorouridine
  modified_base 11: mod_base = OTHER; note = 2'-O-methyladenosine
  modified_base 12: mod_base = OTHER; note = 2'-fluorouridine
  modified_base 13: mod_base = OTHER; note = 2'-O-methylcytidine
  modified_base 14: mod_base = OTHER; note = 2'-fluorouridine
  modified_base 15: mod_base = OTHER; note = 2'-O-methyluridine
  modified_base 16: mod_base = OTHER; note = 2'-fluorocytidine
  modified_base 17: mod_base = OTHER; note = 2'-O-methyladenosine
  modified_base 18: mod_base = OTHER; note = 2'-fluoroadenosine
  modified_base 19: mod_base = OTHER; note = 2'-O-methylguanosine
  modified_base 20: mod_base = OTHER; note = 2'-fluorocytidine
  modified_base 21: mod_base = OTHER; note = 2'-O-methylcytidine
  modified_base 22: mod_base = OTHER; note = 2'-fluoroadenosine
  modified_base 23: mod_base = OTHER; note = 2'-O-methyladenosine
  modified_base 24: mod_base = OTHER; note = 2'-fluorouridine
  modified_base 25: mod_base = OTHER; note = 2'-O-methyladenosine
  modified_base 26: mod_base = OTHER; note = 2'-fluoroadenosine
  modified_base 27: mod_base = OTHER; note = 2'-O-methyladenosine
  modified_base 28: mod_base = OTHER; note = 2'-fluoroguanosine
  modified_base 29: mod_base = OTHER; note = 2'-O-methylcytidine
  modified_base 30: mod_base = OTHER; note = 2'-fluorouridine
  modified_base 31: mod_base = OTHER; note = 2'-O-methylguanosine
  modified_base 32: mod_base = OTHER; note = 2'-fluoroguanosine
  modified_base 33: mod_base = OTHER; note = 2'-O-methyladenosine
  modified_base 34: mod_base = OTHER; note = 2'-fluoroadenosine
tagaataaatatcttcaagccaataaagctggaa

SEQ ID NO: 95 - RNA, 34 nt, synthetic construct
  source 1..34: mol_type = other RNA
  modified_base 1: mod_base = OTHER; note = Phosphate 2'-O-methyluridine, wherein phosphate may be absent
  modified_base 2: mod_base = OTHER; note = 2'-fluoroadenosine
  modified_base 3: mod_base = OTHER; note = 2'-O-methyladenosine
  modified_base 4: mod_base = OTHER; note = 2'-fluoroadenosine
  modified_base 5: mod_base = OTHER; note = 2'-O-methylguanosine
  modified_base 6: mod_base = OTHER; note = 2'-fluorocytidine
  modified_base 7: mod_base = OTHER; note = 2'-O-methyladenosine
  modified_base 8: mod_base = OTHER; note = 2'-fluoroadenosine
  modified_base 9: mod_base = OTHER; note = 2'-O-methyladenosine
  modified_base 10: mod_base = OTHER; note = 2'-fluoroadenosine
  modified_base 11: mod_base = OTHER; note = 2'-O-methylcytidine
  modified_base 12: mod_base = OTHER; note = 2'-fluoroadenosine
  modified_base 13: mod_base = OTHER; note = 2'-O-methylguanosine
  modified_base 14: mod_base = OTHER; note = 2'-fluoroguanosine
  modified_base 15: mod_base = OTHER; note = 2'-O-methyluridine
  modified_base 16: mod_base = OTHER; note = 2'-fluorocytidine
  modified_base 17: mod_base = OTHER; note = 2'-O-methyluridine
  modified_base 18: mod_base = OTHER; note = 2'-fluoroadenosine
  modified_base 19: mod_base = OTHER; note = 2'-O-methylguanosine
  modified_base 20: mod_base = OTHER; note = 2'-fluorocytidine
  modified_base 21: mod_base = OTHER; note = 2'-O-methylcytidine
  modified_base 22: mod_base = OTHER; note = 2'-fluoroadenosine
  modified_base 23: mod_base = OTHER; note = 2'-O-methyladenosine
  modified_base 24: mod_base = OTHER; note = 2'-fluorouridine
  modified_base 25: mod_base = OTHER; note = 2'-O-methyladenosine
  modified_base 26: mod_base = OTHER; note = 2'-fluoroadenosine
  modified_base 27: mod_base = OTHER; note = 2'-O-methyladenosine
  modified_base 28: mod_base = OTHER; note = 2'-fluoroguanosine
  modified_base 29: mod_base = OTHER; note = 2'-O-methylcytidine
  modified_base 30: mod_base = OTHER; note = 2'-fluorouridine
  modified_base 31: mod_base = OTHER; note = 2'-O-methylguanosine
  modified_base 32: mod_base = OTHER; note = 2'-fluoroguanosine
  modified_base 33: mod_base = OTHER; note = 2'-O-methyladenosine
  modified_base 34: mod_base = OTHER; note = 2'-fluoroadenosine
taaagcaaaacaggtctagccaataaagctggaa

SEQ ID NO: 96 - RNA, 34 nt, synthetic construct
  source 1..34: mol_type = other RNA
  modified_base 1: mod_base = OTHER; note = Phosphate 2'-O-methyluridine, wherein phosphate may be absent
  modified_base 2: mod_base = OTHER; note = 2'-fluorocytidine
  modified_base 3: mod_base = OTHER; note = 2'-O-methyluridine
  modified_base 4: mod_base = OTHER; note = 2'-fluorouridine
  modified_base 5: mod_base = OTHER; note = 2'-O-methylcytidine
  modified_base 6: mod_base = OTHER; note = 2'-fluoroadenosine
  modified_base 7: mod_base = OTHER; note = 2'-O-methyladenosine
  modified_base 8: mod_base = OTHER; note = 2'-fluoroguanosine
  modified_base 9: mod_base = OTHER; note = 2'-O-methyluridine
  modified_base 10: mod_base = OTHER; note = 2'-fluorouridine
  modified_base 11: mod_base = OTHER; note = 2'-O-methyladenosine
  modified_base 12: mod_base = OTHER; note = 2'-fluorocytidine
  modified_base 13: mod_base = OTHER; note = 2'-O-methyladenosine
  modified_base 14: mod_base = OTHER; note = 2'-fluoroadenosine
  modified_base 15: mod_base = OTHER; note = 2'-O-methyladenosine
  modified_base 16: mod_base = OTHER; note = 2'-fluoroadenosine
  modified_base 17: mod_base = OTHER; note = 2'-O-methylguanosine
  modified_base 18: mod_base = OTHER; note = 2'-fluorocytidine
  modified_base 19: mod_base = OTHER; note = 2'-O-methyladenosine
  modified_base 20: mod_base = OTHER; note = 2'-fluorocytidine
  modified_base 21: mod_base = OTHER; note = 2'-O-methyladenosine
  modified_base 22: mod_base = OTHER; note = 2'-fluoroadenosine
  modified_base 23: mod_base = OTHER; note = 2'-O-methyluridine
  modified_base 24: mod_base = OTHER; note = 2'-fluoroadenosine
  modified_base 25: mod_base = OTHER; note = 2'-O-methyladenosine
  modified_base 26: mod_base = OTHER; note = 2'-fluoroadenosine
  modified_base 27: mod_base = OTHER; note = 2'-O-methylguanosine
  modified_base 28: mod_base = OTHER; note = 2'-fluorocytidine
  modified_base 29: mod_base = OTHER; note = 2'-O-methyluridine
  modified_base 30: mod_base = OTHER; note = 2'-fluoroguanosine
  modified_base 31: mod_base = OTHER; note = 2'-O-methylguanosine
  modified_base 32: mod_base = OTHER; note = 2'-fluoroadenosine
  modified_base 33: mod_base = OTHER; note = 2'-O-methylcytidine
  modified_base 34: mod_base = OTHER; note = 2'-fluoroadenosine
tcttcaagttacaaaagcacaataaagctggaca

SEQ ID NO: 97 - RNA, 34 nt, synthetic construct
  source 1..34: mol_type = other RNA
  modified_base 1: mod_base = OTHER; note = Phosphate 2'-O-methyluridine, wherein phosphate may be absent
  modified_base 2: mod_base = OTHER; note = 2'-fluoroadenosine
  modified_base 3: mod_base = OTHER; note = 2'-O-methyladenosine
  modified_base 4: mod_base = OTHER; note = 2'-fluoroadenosine
  modified_base 5: mod_base = OTHER; note = 2'-O-methyladenosine
  modified_base 6: mod_base = OTHER; note = 2'-fluoroguanosine
  modified_base 7: mod_base = OTHER; note = 2'-O-methylcytidine
  modified_base 8: mod_base = OTHER; note = 2'-fluoroadenosine
  modified_base 9: mod_base = OTHER; note = 2'-O-methyladenosine
  modified_base 10: mod_base = OTHER; note = 2'-fluoroadenosine
  modified_base 11: mod_base = OTHER; note = 2'-O-methyladenosine
  modified_base 12: mod_base = OTHER; note = 2'-fluorocytidine
  modified_base 13: mod_base = OTHER; note = 2'-O-methyladenosine
  modified_base 14: mod_base = OTHER; note = 2'-fluoroguanosine
  modified_base 15: mod_base = OTHER; note = 2'-O-methylguanosine
  modified_base 16: mod_base = OTHER; note = 2'-fluorouridine
  modified_base 17: mod_base = OTHER; note = 2'-O-methylcytidine
  modified_base 18: mod_base = OTHER; note = 2'-fluorouridine
  modified_base 19: mod_base = OTHER; note = 2'-O-methyladenosine
  modified_base 20: mod_base = OTHER; note = 2'-fluorocytidine
  modified_base 21: mod_base = OTHER; note = 2'-O-methyladenosine
  modified_base 22: mod_base = OTHER; note = 2'-fluoroadenosine
  modified_base 23: mod_base = OTHER; note = 2'-O-methyluridine
  modified_base 24: mod_base = OTHER; note = 2'-fluoroadenosine
  modified_base 25: mod_base = OTHER; note = 2'-O-methyladenosine
  modified_base 26: mod_base = OTHER; note = 2'-fluoroadenosine
  modified_base 27: mod_base = OTHER; note = 2'-O-methylguanosine
  modified_base 28: mod_base = OTHER; note = 2'-fluorocytidine
  modified_base 29: mod_base = OTHER; note = 2'-O-methyluridine
  modified_base 30: mod_base = OTHER; note = 2'-fluoroguanosine
  modified_base 31: mod_base = OTHER; note = 2'-O-methylguanosine
  modified_base 32: mod_base = OTHER; note = 2'-fluoroadenosine
  modified_base 33: mod_base = OTHER; note = 2'-O-methylcytidine
  modified_base 34: mod_base = OTHER; note = 2'-fluoroadenosine
taaaagcaaaacaggtctacaataaagctggaca

SEQ ID NO: 98 - RNA, 34 nt, synthetic construct
  source 1..34: mol_type = other RNA
  modified_base 1: mod_base = OTHER; note = Phosphate 2'-O-methyluridine, wherein phosphate may be absent
  modified_base 2: mod_base = OTHER; note = 2'-fluoroadenosine
  modified_base 3: mod_base = OTHER; note = 2'-O-methylcytidine
  modified_base 4: mod_base = OTHER; note = 2'-fluoroadenosine
  modified_base 5: mod_base = OTHER; note = 2'-O-methyladenosine
  modified_base 6: mod_base = OTHER; note = 2'-fluoroadenosine
  modified_base 7: mod_base = OTHER; note = 2'-O-methyladenosine
  modified_base 8: mod_base = OTHER; note = 2'-fluoroguanosine
  modified_base 9: mod_base = OTHER; note = 2'-O-methylcytidine
  modified_base 10: mod_base = OTHER; note = 2'-fluoroadenosine
  modified_base 11: mod_base = OTHER; note = 2'-O-methyladenosine
  modified_base 12: mod_base = OTHER; note = 2'-fluoroadenosine
  modified_base 13: mod_base = OTHER; note = 2'-O-methyladenosine
  modified_base 14: mod_base = OTHER; note = 2'-fluorocytidine
  modified_base 15: mod_base = OTHER; note = 2'-O-methyladenosine
  modified_base 16: mod_base = OTHER; note = 2'-fluoroguanosine
  modified_base 17: mod_base = OTHER; note = 2'-O-methylguanosine
  modified_base 18: mod_base = OTHER; note = 2'-fluorouridine
  modified_base 19: mod_base = OTHER; note = 2'-O-methylcytidine
  modified_base 20: mod_base = OTHER; note = 2'-fluorocytidine
  modified_base 21: mod_base = OTHER; note = 2'-O-methyladenosine
  modified_base 22: mod_base = OTHER; note = 2'-fluoroadenosine
  modified_base 23: mod_base = OTHER; note = 2'-O-methyluridine
  modified_base 24: mod_base = OTHER; note = 2'-fluoroadenosine
  modified_base 25: mod_base = OTHER; note = 2'-O-methyladenosine
  modified_base 26: mod_base = OTHER; note = 2'-fluoroadenosine
  modified_base 27: mod_base = OTHER; note = 2'-O-methylguanosine
  modified_base 28: mod_base = OTHER; note = 2'-fluorocytidine
  modified_base 29: mod_base = OTHER; note = 2'-O-methyluridine
  modified_base 30: mod_base = OTHER; note = 2'-fluoroguanosine
  modified_base 31: mod_base = OTHER; note = 2'-O-methylguanosine
  modified_base 32: mod_base = OTHER; note = 2'-fluoroadenosine
  modified_base 33: mod_base = OTHER; note = 2'-O-methylcytidine
  modified_base 34: mod_base = OTHER; note = 2'-fluoroadenosine
tacaaaagcaaaacaggtccaataaagctggaca

SEQ ID NO: 99 - RNA, 34 nt, synthetic construct
  source 1..34: mol_type = other RNA
  modified_base 1: mod_base = OTHER; note = Phosphate 2'-O-methyluridine, wherein phosphate may be absent
  modified_base 2: mod_base = OTHER; note = 2'-fluoroguanosine
  modified_base 3: mod_base = OTHER; note = 2'-O-methylcytidine
  modified_base 4: mod_base = OTHER; note = 2'-fluoroadenosine
  modified_base 5: mod_base = OTHER; note = 2'-O-methyladenosine
  modified_base 6: mod_base = OTHER; note = 2'-fluoroadenosine
  modified_base 7: mod_base = OTHER; note = 2'-O-methyladenosine
  modified_base 8: mod_base = OTHER; note = 2'-fluorocytidine
  modified_base 9: mod_base = OTHER; note = 2'-O-methyladenosine
  modified_base 10: mod_base = OTHER; note = 2'-fluoroguanosine
  modified_base 11: mod_base = OTHER; note = 2'-O-methylguanosine
  modified_base 12: mod_base = OTHER; note = 2'-fluorouridine
  modified_base 13: mod_base = OTHER; note = 2'-O-methylcytidine
  modified_base 14: mod_base = OTHER; note = 2'-fluorouridine
  modified_base 15: mod_base = OTHER; note = 2'-O-methyladenosine
  modified_base 16: mod_base = OTHER; note = 2'-fluoroguanosine
  modified_base 17: mod_base = OTHER; note = 2'-O-methyladenosine
  modified_base 18: mod_base = OTHER; note = 2'-fluoroadenosine
  modified_base 19: mod_base = OTHER; note = 2'-O-methyladenosine
  modified_base 20: mod_base = OTHER; note = 2'-fluorocytidine
  modified_base 21: mod_base = OTHER; note = 2'-O-methyladenosine
  modified_base 22: mod_base = OTHER; note = 2'-fluoroadenosine
  modified_base 23: mod_base = OTHER; note = 2'-O-methyluridine
  modified_base 24: mod_base = OTHER; note = 2'-fluoroadenosine
  modified_base 25: mod_base = OTHER; note = 2'-O-methyladenosine
  modified_base 26: mod_base = OTHER; note = 2'-fluoroadenosine
  modified_base 27: mod_base = OTHER; note = 2'-O-methylguanosine
  modified_base 28: mod_base = OTHER; note = 2'-fluorocytidine
  modified_base 29: mod_base = OTHER; note = 2'-O-methyluridine
  modified_base 30: mod_base = OTHER; note = 2'-fluoroguanosine
  modified_base 31: mod_base = OTHER; note = 2'-O-methylguanosine
  modified_base 32: mod_base = OTHER; note = 2'-fluoroadenosine
  modified_base 33: mod_base = OTHER; note = 2'-O-methylcytidine
  modified_base 34: mod_base = OTHER; note = 2'-fluoroadenosine
tgcaaaacaggtctagaaacaataaagctggaca

SEQ ID NO: 100 - RNA, 34 nt, synthetic construct
  source 1..34: mol_type = other RNA
  modified_base 1: mod_base = OTHER; note = Phosphate 2'-O-methyluridine, wherein phosphate may be absent
  modified_base 2: mod_base = OTHER; note = 2'-fluorocytidine
  modified_base 3: mod_base = OTHER; note = 2'-O-methyladenosine
  modified_base 4: mod_base = OTHER; note = 2'-fluoroadenosine
  modified_base 5: mod_base = OTHER; note = 2'-O-methyladenosine
  modified_base 6: mod_base = OTHER; note = 2'-fluoroadenosine
  modified_base 7: mod_base = OTHER; note = 2'-O-methylguanosine
  modified_base 8: mod_base = OTHER; note = 2'-fluorocytidine
  modified_base 9: mod_base = OTHER; note = 2'-O-methyladenosine
  modified_base 10: mod_base = OTHER; note = 2'-fluoroadenosine
  modified_base 11: mod_base = OTHER; note = 2'-O-methyladenosine
  modified_base 12: mod_base = OTHER; note = 2'-fluoroadenosine
  modified_base 13: mod_base = OTHER; note = 2'-O-methylcytidine
  modified_base 14: mod_base = OTHER; note = 2'-fluoroadenosine
  modified_base 15: mod_base = OTHER; note = 2'-O-methylguanosine
  modified_base 16: mod_base = OTHER; note = 2'-fluoroguanosine
  modified_base 17: mod_base = OTHER; note = 2'-O-methyluridine
  modified_base 18: mod_base = OTHER; note = 2'-fluorocytidine
  modified_base 19: mod_base = OTHER; note = 2'-O-methyluridine
  modified_base 20: mod_base = OTHER; note = 2'-fluorocytidine
  modified_base 21: mod_base = OTHER; note = 2'-O-methyladenosine
  modified_base 22: mod_base = OTHER; note = 2'-fluoroadenosine
  modified_base 23: mod_base = OTHER; note = 2'-O-methyluridine
  modified_base 24: mod_base = OTHER; note = 2'-fluoroadenosine
  modified_base 25: mod_base = OTHER; note = 2'-O-methyladenosine
  modified_base 26: mod_base = OTHER; note = 2'-fluoroadenosine
  modified_base 27: mod_base = OTHER; note = 2'-O-methylguanosine
  modified_base 28: mod_base = OTHER; note = 2'-fluorocytidine
  modified_base 29: mod_base = OTHER; note = 2'-O-methyluridine
  modified_base 30: mod_base = OTHER; note = 2'-fluoroguanosine
  modified_base 31: mod_base = OTHER; note = 2'-O-methylguanosine
  modified_base 32: mod_base = OTHER; note = 2'-fluoroadenosine
  modified_base 33: mod_base = OTHER; note = 2'-O-methylcytidine
  modified_base 34: mod_base = OTHER; note = 2'-fluoroadenosine
tcaaaagcaaaacaggtctcaataaagctggaca

SEQ ID NO: 101 - RNA, 34 nt, synthetic construct
  source 1..34: mol_type = other RNA
  modified_base 1: mod_base = OTHER; note = Phosphate 2'-O-methyluridine, wherein phosphate may be absent
  modified_base 2: mod_base = OTHER; note = 2'-fluoroadenosine
  modified_base 3: mod_base = OTHER; note = 2'-O-methylguanosine
  modified_base 4: mod_base = OTHER; note = 2'-fluoroadenosine
  modified_base 5: mod_base = OTHER; note = 2'-O-methyladenosine
  modified_base 6: mod_base = OTHER; note = 2'-fluorouridine
  modified_base 7: mod_base = OTHER; note = 2'-O-methyladenosine
  modified_base 8: mod_base = OTHER; note = 2'-fluoroadenosine
  modified_base 9: mod_base = OTHER; note = 2'-O-methyladenosine
  modified_base 10: mod_base = OTHER; note = 2'-fluorouridine
  modified_base 11: mod_base = OTHER; note = 2'-O-methyladenosine
  modified_base 12: mod_base = OTHER; note = 2'-fluorouridine
  modified_base 13: mod_base = OTHER; note = 2'-O-methylcytidine
  modified_base 14: mod_base = OTHER; note = 2'-fluorouridine
  modified_base 15: mod_base = OTHER; note = 2'-O-methyluridine
  modified_base 16: mod_base = OTHER; note = 2'-fluorocytidine
  modified_base 17: mod_base = OTHER; note = 2'-O-methyladenosine
  modified_base 18: mod_base = OTHER; note = 2'-fluoroadenosine
  modified_base 19: mod_base = OTHER; note = 2'-O-methylguanosine
  modified_base 20: mod_base = OTHER; note = 2'-fluorocytidine
  modified_base 21: mod_base = OTHER; note = 2'-O-methyladenosine
  modified_base 22: mod_base = OTHER; note = 2'-fluoroadenosine
  modified_base 23: mod_base = OTHER; note = 2'-O-methyluridine
  modified_base 24: mod_base = OTHER; note = 2'-fluoroadenosine
  modified_base 25: mod_base = OTHER; note = 2'-O-methyladenosine
  modified_base 26: mod_base = OTHER; note = 2'-fluoroadenosine
  modified_base 27: mod_base = OTHER; note = 2'-O-methylguanosine
  modified_base 28: mod_base = OTHER; note = 2'-fluorocytidine
  modified_base 29: mod_base = OTHER; note = 2'-O-methyluridine
  modified_base 30: mod_base = OTHER; note = 2'-fluoroguanosine
  modified_base 31: mod_base = OTHER; note = 2'-O-methylguanosine
  modified_base 32: mod_base = OTHER; note = 2'-fluoroadenosine
  modified_base 33: mod_base = OTHER; note = 2'-O-methylcytidine
  modified_base 34: mod_base = OTHER; note = 2'-fluoroadenosine
tagaataaatatcttcaagcaataaagctggaca

SEQ ID NO: 102 - RNA, 34 nt, synthetic construct
  source 1..34: mol_type = other RNA
  modified_base 1: mod_base = OTHER; note = Phosphate 2'-O-methyluridine, wherein phosphate may be absent
  modified_base 2: mod_base = OTHER; note = 2'-fluoroadenosine
  modified_base 3: mod_base = OTHER; note = 2'-O-methyladenosine
  modified_base 4: mod_base = OTHER; note = 2'-fluoroadenosine
  modified_base 5: mod_base = OTHER; note = 2'-O-methylguanosine
  modified_base 6: mod_base = OTHER; note = 2'-fluorocytidine
  modified_base 7: mod_base = OTHER; note = 2'-O-methyladenosine
  modified_base 8: mod_base = OTHER; note = 2'-fluoroadenosine
  modified_base 9: mod_base = OTHER; note = 2'-O-methyladenosine
  modified_base 10: mod_base = OTHER; note = 2'-fluoroadenosine
  modified_base 11: mod_base = OTHER; note = 2'-O-methylcytidine
  modified_base 12: mod_base = OTHER; note = 2'-fluoroadenosine
  modified_base 13: mod_base = OTHER; note = 2'-O-methylguanosine
  modified_base 14: mod_base = OTHER; note = 2'-fluoroguanosine
  modified_base 15: mod_base = OTHER; note = 2'-O-methyluridine
  modified_base 16: mod_base = OTHER; note = 2'-fluorocytidine
  modified_base 17: mod_base = OTHER; note = 2'-O-methyluridine
  modified_base 18: mod_base = OTHER; note = 2'-fluoroadenosine
  modified_base 19: mod_base = OTHER; note = 2'-O-methylguanosine
  modified_base 20: mod_base = OTHER; note = 2'-fluorocytidine
  modified_base 21: mod_base = OTHER; note = 2'-O-methyladenosine
  modified_base 22: mod_base = OTHER; note = 2'-fluoroadenosine
  modified_base 23: mod_base = OTHER; note = 2'-O-methyluridine
  modified_base 24: mod_base = OTHER; note = 2'-fluoroadenosine
  modified_base 25: mod_base = OTHER; note = 2'-O-methyladenosine
  modified_base 26: mod_base = OTHER; note = 2'-fluoroadenosine
  modified_base 27: mod_base = OTHER; note = 2'-O-methylguanosine
  modified_base 28: mod_base = OTHER; note = 2'-fluorocytidine
  modified_base 29: mod_base = OTHER; note = 2'-O-methyluridine
  modified_base 30: mod_base = OTHER; note = 2'-fluoroguanosine
  modified_base 31: mod_base = OTHER; note = 2'-O-methylguanosine
  modified_base 32: mod_base = OTHER; note = 2'-fluoroadenosine
  modified_base 33: mod_base = OTHER; note = 2'-O-methylcytidine
  modified_base 34: mod_base = OTHER; note = 2'-fluoroadenosine
taaagcaaaacaggtctagcaataaagctggaca

SEQ ID NO: 103 - RNA, 34 nt, synthetic construct
  source 1..34: mol_type = other RNA
  modified_base 1: mod_base = OTHER; note = Phosphate 2'-O-methyluridine, wherein phosphate may be absent
  modified_base 2: mod_base = OTHER; note = 2'-fluorocytidine
  modified_base 3: mod_base = OTHER; note = 2'-O-methyluridine
  modified_base 4: mod_base = OTHER; note = 2'-fluorouridine
  modified_base 5: mod_base = OTHER; note = 2'-O-methylcytidine
  modified_base 6: mod_base = OTHER; note = 2'-fluoroadenosine
  modified_base 7: mod_base = OTHER; note = 2'-O-methyladenosine
  modified_base 8: mod_base = OTHER; note = 2'-fluoroguanosine
  modified_base 9: mod_base = OTHER; note = 2'-O-methyluridine
  modified_base 10: mod_base = OTHER; note = 2'-fluorouridine
  modified_base 11: mod_base = OTHER; note = 2'-O-methyladenosine
  modified_base 12: mod_base = OTHER; note = 2'-fluorocytidine
  modified_base 13: mod_base = OTHER; note = 2'-O-methyladenosine
  modified_base 14: mod_base = OTHER; note = 2'-fluoroadenosine
  modified_base 15: mod_base = OTHER; note = 2'-O-methyladenosine
  modified_base 16: mod_base = OTHER; note = 2'-fluoroadenosine
  modified_base 17: mod_base = OTHER; note = 2'-O-methylguanosine
  modified_base 18: mod_base = OTHER; note = 2'-fluorocytidine
  modified_base 19: mod_base = OTHER; note = 2'-O-methyladenosine
  modified_base 20: mod_base = OTHER; note = 2'-fluorocytidine
  modified_base 21: mod_base = OTHER; note = 2'-O-methyladenosine
  modified_base 22: mod_base = OTHER; note = 2'-fluoroguanosine
  modified_base 23: mod_base = OTHER; note = 2'-O-methyluridine
  modified_base 24: mod_base = OTHER; note = 2'-fluoroadenosine
  modified_base 25: mod_base = OTHER; note = 2'-O-methyluridine
  modified_base 26: mod_base = OTHER; note = 2'-fluorouridine
  modified_base 27: mod_base = OTHER; note = 2'-O-methylcytidine
  modified_base 28: mod_base = OTHER; note = 2'-fluorouridine
  modified_base 29: mod_base = OTHER; note = 2'-O-methylcytidine
  modified_base 30: mod_base = OTHER; note = 2'-fluoroadenosine
  modified_base 31: mod_base = OTHER; note = 2'-O-methylguanosine
  modified_base 32: mod_base = OTHER; note = 2'-fluorouridine
  modified_base 33: mod_base = OTHER; note = 2'-O-methylguanosine
  modified_base 34: mod_base = OTHER; note = 2'-fluoroadenosine
tcttcaagttacaaaagcacagtattctcagtga

SEQ ID NO: 104 - RNA, 34 nt, synthetic construct
  source 1..34: mol_type = other RNA
  modified_base 1: mod_base = OTHER; note = Phosphate 2'-O-methyluridine, wherein phosphate may be absent
  modified_base 2: mod_base = OTHER; note = 2'-fluoroadenosine
  modified_base 3: mod_base = OTHER; note = 2'-O-methyladenosine
  modified_base 4: mod_base = OTHER; note = 2'-fluoroadenosine
  modified_base 5: mod_base = OTHER; note = 2'-O-methyladenosine
  modified_base 6: mod_base = OTHER; note = 2'-fluoroguanosine
  modified_base 7: mod_base = OTHER; note = 2'-O-methylcytidine
  modified_base 8: mod_base = OTHER; note = 2'-fluoroadenosine
  modified_base 9: mod_base = OTHER; note = 2'-O-methyladenosine
  modified_base 10: mod_base = OTHER; note = 2'-fluoroadenosine
  modified_base 11: mod_base = OTHER; note = 2'-O-methyladenosine
  modified_base 12: mod_base = OTHER; note = 2'-fluorocytidine
  modified_base 13: mod_base = OTHER; note = 2'-O-methyladenosine
  modified_base 14: mod_base = OTHER; note = 2'-fluoroguanosine
  modified_base 15: mod_base = OTHER; note = 2'-O-methylguanosine
  modified_base 16: mod_base = OTHER; note = 2'-fluorouridine
  modified_base 17: mod_base = OTHER; note = 2'-O-methylcytidine
  modified_base 18: mod_base = OTHER; note = 2'-fluorouridine
  modified_base 19: mod_base = OTHER; note = 2'-O-methyladenosine
  modified_base 20: mod_base = OTHER; note = 2'-fluorocytidine
  modified_base 21: mod_base = OTHER; note = 2'-O-methyladenosine
  modified_base 22: mod_base = OTHER; note = 2'-fluoroguanosine
  modified_base 23: mod_base = OTHER; note = 2'-O-methyluridine
  modified_base 24: mod_base = OTHER; note = 2'-fluoroadenosine
  modified_base 25: mod_base = OTHER; note = 2'-O-methyluridine
  modified_base 26: mod_base = OTHER; note = 2'-fluorouridine
  modified_base 27: mod_base = OTHER; note = 2'-O-methylcytidine
  modified_base 28: mod_base = OTHER; note = 2'-fluorouridine
  modified_base 29: mod_base = OTHER; note = 2'-O-methylcytidine
  modified_base 30: mod_base = OTHER; note = 2'-fluoroadenosine
  modified_base 31: mod_base = OTHER; note = 2'-O-methylguanosine
  modified_base 32: mod_base = OTHER; note = 2'-fluorouridine
  modified_base 33: mod_base = OTHER; note = 2'-O-methylguanosine
  modified_base 34: mod_base = OTHER; note = 2'-fluoroadenosine
taaaagcaaaacaggtctacagtattctcagtga

SEQ ID NO: 105 - RNA, 34 nt, synthetic construct
  source 1..34: mol_type = other RNA
  modified_base 1: mod_base = OTHER; note = Phosphate 2'-O-methyluridine, wherein phosphate may be absent
  modified_base 2: mod_base = OTHER; note = 2'-fluoroadenosine
  modified_base 3: mod_base = OTHER; note = 2'-O-methylcytidine
  modified_base 4: mod_base = OTHER; note = 2'-fluoroadenosine
  modified_base 5: mod_base = OTHER; note = 2'-O-methyladenosine
  modified_base 6: mod_base = OTHER; note = 2'-fluoroadenosine
  modified_base 7: mod_base = OTHER; note = 2'-O-methyladenosine
  modified_base 8: mod_base = OTHER; note = 2'-fluoroguanosine
  modified_base 9: mod_base = OTHER; note = 2'-O-methylcytidine
  modified_base 10: mod_base = OTHER; note = 2'-fluoroadenosine
  modified_base 11: mod_base = OTHER; note = 2'-O-methyladenosine
  modified_base 12: mod_base = OTHER; note = 2'-fluoroadenosine
  modified_base 13: mod_base = OTHER; note = 2'-O-methyladenosine
  modified_base 14: mod_base = OTHER; note = 2'-fluorocytidine
  modified_base 15: mod_base = OTHER; note = 2'-O-methyladenosine
  modified_base 16: mod_base = OTHER; note = 2'-fluoroguanosine
  modified_base 17: mod_base = OTHER; note = 2'-O-methylguanosine
  modified_base 18: mod_base = OTHER; note = 2'-fluorouridine
  modified_base 19: mod_base = OTHER; note = 2'-O-methylcytidine
  modified_base 20: mod_base = OTHER; note = 2'-fluorocytidine
  modified_base 21: mod_base = OTHER; note = 2'-O-methyladenosine
  modified_base 22: mod_base = OTHER; note = 2'-fluoroguanosine
  modified_base 23: mod_base = OTHER; note = 2'-O-methyluridine
  modified_base 24: mod_base = OTHER; note = 2'-fluoroadenosine
  modified_base 25: mod_base = OTHER; note = 2'-O-methyluridine
  modified_base 26: mod_base = OTHER; note = 2'-fluorouridine
  modified_base 27: mod_base = OTHER; note = 2'-O-methylcytidine
  modified_base 28: mod_base = OTHER; note = 2'-fluorouridine
  modified_base 29: mod_base = OTHER; note = 2'-O-methylcytidine
  modified_base 30: mod_base = OTHER; note = 2'-fluoroadenosine
  modified_base 31: mod_base = OTHER; note = 2'-O-methylguanosine
  modified_base 32: mod_base = OTHER; note = 2'-fluorouridine
  modified_base 33: mod_base = OTHER; note = 2'-O-methylguanosine
  modified_base 34: mod_base = OTHER; note = 2'-fluoroadenosine
tacaaaagcaaaacaggtccagtattctcagtga

SEQ ID NO: 106 - RNA, 34 nt, synthetic construct
  source 1..34: mol_type = other RNA
  modified_base 1: mod_base = OTHER; note = Phosphate 2'-O-methyluridine, wherein phosphate may be absent
  modified_base 2: mod_base = OTHER; note = 2'-fluoroguanosine
  modified_base 3: mod_base = OTHER; note = 2'-O-methylcytidine
  modified_base 4: mod_base = OTHER; note = 2'-fluoroadenosine
  modified_base 5: mod_base = OTHER; note = 2'-O-methyladenosine
  modified_base 6: mod_base = OTHER; note = 2'-fluoroadenosine
  modified_base 7: mod_base = OTHER; note = 2'-O-methyladenosine
  modified_base 8: mod_base = OTHER; note = 2'-fluorocytidine
  modified_base 9: mod_base = OTHER; note = 2'-O-methyladenosine
  modified_base 10: mod_base = OTHER; note = 2'-fluoroguanosine
  modified_base 11: mod_base = OTHER; note = 2'-O-methylguanosine
  modified_base 12: mod_base = OTHER; note = 2'-fluorouridine
  modified_base 13: mod_base = OTHER; note = 2'-O-methylcytidine
  modified_base 14: mod_base = OTHER; note = 2'-fluorouridine
  modified_base 15: mod_base = OTHER; note = 2'-O-methyladenosine
  modified_base 16: mod_base = OTHER; note = 2'-fluoroguanosine
  modified_base 17: mod_base = OTHER; note = 2'-O-methyladenosine
  modified_base 18: mod_base = OTHER; note = 2'-fluoroadenosine
  modified_base 19: mod_base = OTHER; note = 2'-O-methyladenosine
  modified_base 20: mod_base = OTHER; note = 2'-fluorocytidine
  modified_base 21: mod_base = OTHER; note = 2'-O-methyladenosine
  modified_base 22: mod_base = OTHER; note = 2'-fluoroguanosine
  modified_base 23: mod_base = OTHER; note = 2'-O-methyluridine
  modified_base 24: mod_base = OTHER; note = 2'-fluoroadenosine
  modified_base 25: mod_base = OTHER; note = 2'-O-methyluridine
  modified_base 26: mod_base = OTHER; note = 2'-fluorouridine
  modified_base 27: mod_base = OTHER; note = 2'-O-methylcytidine
  modified_base 28: mod_base = OTHER; note = 2'-fluorouridine
  modified_base 29: mod_base = OTHER; note = 2'-O-methylcytidine
  modified_base 30: mod_base = OTHER; note = 2'-fluoroadenosine
  modified_base 31: mod_base = OTHER; note = 2'-O-methylguanosine
  modified_base 32: mod_base = OTHER; note = 2'-fluorouridine
  modified_base 33: mod_base = OTHER; note = 2'-O-methylguanosine
  modified_base 34: mod_base = OTHER; note = 2'-fluoroadenosine
tgcaaaacaggtctagaaacagtattctcagtga

SEQ ID NO: 107 - RNA, 34 nt, synthetic construct
  source 1..34: mol_type = other RNA
  modified_base 1: mod_base = OTHER; note = Phosphate 2'-O-methyluridine, wherein phosphate may be absent
  modified_base 2: mod_base = OTHER; note = 2'-fluorocytidine
  modified_base 3: mod_base = OTHER; note = 2'-O-methyladenosine
  modified_base 4: mod_base = OTHER; note = 2'-fluoroadenosine
  modified_base 5: mod_base = OTHER; note = 2'-O-methyladenosine
  modified_base 6: mod_base = OTHER; note = 2'-fluoroadenosine
  modified_base 7: mod_base = OTHER; note = 2'-O-methylguanosine
  modified_base 8: mod_base = OTHER; note = 2'-fluorocytidine
  modified_base 9: mod_base = OTHER; note = 2'-O-methyladenosine
  modified_base 10: mod_base = OTHER; note = 2'-fluoroadenosine
  modified_base 11: mod_base = OTHER; note = 2'-O-methyladenosine
  modified_base 12: mod_base = OTHER; note = 2'-fluoroadenosine
  modified_base 13: mod_base = OTHER; note = 2'-O-methylcytidine
  modified_base 14: mod_base = OTHER; note = 2'-fluoroadenosine
  modified_base 15: mod_base = OTHER; note = 2'-O-methylguanosine
  modified_base 16: mod_base = OTHER; note = 2'-fluoroguanosine
  modified_base 17: mod_base = OTHER; note = 2'-O-methyluridine
  modified_base 18: mod_base = OTHER; note = 2'-fluorocytidine
  modified_base 19: mod_base = OTHER; note = 2'-O-methyluridine
  modified_base 20: mod_base = OTHER; note = 2'-fluorocytidine
  modified_base 21: mod_base = OTHER; note = 2'-O-methyladenosine
  modified_base 22: mod_base = OTHER; note = 2'-fluoroguanosine
  modified_base 23: mod_base = OTHER; note = 2'-O-methyluridine
  modified_base 24: mod_base = OTHER; note = 2'-fluoroadenosine
  modified_base 25: mod_base = OTHER; note = 2'-O-methyluridine
  modified_base 26: mod_base = OTHER; note = 2'-fluorouridine
  modified_base 27: mod_base = OTHER; note = 2'-O-methylcytidine
  modified_base 28: mod_base = OTHER; note = 2'-fluorouridine
  modified_base 29: mod_base = OTHER; note = 2'-O-methylcytidine
  modified_base 30: mod_base = OTHER; note = 2'-fluoroadenosine
  modified_base 31: mod_base = OTHER; note = 2'-O-methylguanosine
  modified_base 32: mod_base = OTHER; note = 2'-fluorouridine
  modified_base 33: mod_base = OTHER; note = 2'-O-methylguanosine
  modified_base 34: mod_base = OTHER; note = 2'-fluoroadenosine
tcaaaagcaaaacaggtctcagtattctcagtga

SEQ ID NO: 108 - RNA, 34 nt, synthetic construct
  source 1..34: mol_type = other RNA
  modified_base 1: mod_base = OTHER; note = Phosphate 2'-O-methyluridine, wherein phosphate may be absent
  modified_base 2: mod_base = OTHER; note = 2'-fluoroadenosine
  modified_base 3: mod_base = OTHER; note = 2'-O-methylguanosine
  modified_base 4: mod_base = OTHER; note = 2'-fluoroadenosine
  modified_base 5: mod_base = OTHER; note = 2'-O-methyladenosine
  modified_base 6: mod_base = OTHER; note = 2'-fluorouridine
  modified_base 7: mod_base = OTHER; note = 2'-O-methyladenosine
  modified_base 8: mod_base = OTHER; note = 2'-fluoroadenosine
  modified_base 9: mod_base = OTHER; note = 2'-O-methyladenosine
  modified_base 10: mod_base = OTHER; note = 2'-fluorouridine
  modified_base 11: mod_base = OTHER; note = 2'-O-methyladenosine
  modified_base 12: mod_base = OTHER; note = 2'-fluorouridine
  modified_base 13: mod_base = OTHER; note = 2'-O-methylcytidine
  modified_base 14: mod_base = OTHER; note = 2'-fluorouridine
  modified_base 15: mod_base = OTHER; note = 2'-O-methyluridine
  modified_base 16: mod_base = OTHER; note = 2'-fluorocytidine
  modified_base 17: mod_base = OTHER; note = 2'-O-methyladenosine
  modified_base 18: mod_base = OTHER; note = 2'-fluoroadenosine
  modified_base 19: mod_base = OTHER; note = 2'-O-methylguanosine
  modified_base 20: mod_base = OTHER; note = 2'-fluorocytidine
  modified_base 21: mod_base = OTHER; note = 2'-O-methyladenosine
  modified_base 22: mod_base = OTHER; note = 2'-fluoroguanosine
  modified_base 23: mod_base = OTHER; note = 2'-O-methyluridine
  modified_base 24: mod_base = OTHER; note = 2'-fluoroadenosine
  modified_base 25: mod_base = OTHER; note = 2'-O-methyluridine
  modified_base 26: mod_base = OTHER; note = 2'-fluorouridine
  modified_base 27: mod_base = OTHER; note = 2'-O-methylcytidine
  modified_base 28: mod_base = OTHER; note = 2'-fluorouridine
  modified_base 29: mod_base = OTHER; note = 2'-O-methylcytidine
  modified_base 30: mod_base = OTHER; note = 2'-fluoroadenosine
  modified_base 31: mod_base = OTHER; note = 2'-O-methylguanosine
  modified_base 32: mod_base = OTHER; note = 2'-fluorouridine
  modified_base 33: mod_base = OTHER; note = 2'-O-methylguanosine
  modified_base 34: mod_base = OTHER; note = 2'-fluoroadenosine
tagaataaatatcttcaagcagtattctcagtga

SEQ ID NO: 109 - RNA, 34 nt, synthetic construct
  source 1..34: mol_type = other RNA
  modified_base 1: mod_base = OTHER; note = Phosphate 2'-O-methyluridine, wherein phosphate may be absent
  modified_base 2: mod_base = OTHER; note = 2'-fluoroadenosine
  modified_base 3: mod_base = OTHER; note = 2'-O-methyladenosine
  modified_base 4: mod_base = OTHER; note = 2'-fluoroadenosine
  modified_base 5: mod_base = OTHER; note = 2'-O-methylguanosine
  modified_base 6: mod_base = OTHER; note = 2'-fluorocytidine
  modified_base 7: mod_base = OTHER; note = 2'-O-methyladenosine
  modified_base 8: mod_base = OTHER; note = 2'-fluoroadenosine
  modified_base 9: mod_base = OTHER; note = 2'-O-methyladenosine
  modified_base 10: mod_base = OTHER; note = 2'-fluoroadenosine
  modified_base 11: mod_base = OTHER; note = 2'-O-methylcytidine
  modified_base 12: mod_base = OTHER; note = 2'-fluoroadenosine
  modified_base 13: mod_base = OTHER; note = 2'-O-methylguanosine
  modified_base 14: mod_base = OTHER; note = 2'-fluoroguanosine
  modified_base 15: mod_base = OTHER; note = 2'-O-methyluridine
  modified_base 16: mod_base = OTHER; note = 2'-fluorocytidine
  modified_base 17: mod_base = OTHER; note = 2'-O-methyluridine
  modified_base 18: mod_base = OTHER; note = 2'-fluoroadenosine
  modified_base 19: mod_base = OTHER; note = 2'-O-methylguanosine
  modified_base 20: mod_base = OTHER; note = 2'-fluorocytidine
  modified_base 21: mod_base = OTHER; note = 2'-O-methyladenosine
  modified_base 22: mod_base = OTHER; note = 2'-fluoroguanosine
  modified_base 23: mod_base = OTHER; note = 2'-O-methyluridine
  modified_base 24: mod_base = OTHER; note = 2'-fluoroadenosine
  modified_base 25: mod_base = OTHER; note = 2'-O-methyluridine
  modified_base 26: mod_base = OTHER; note = 2'-fluorouridine
  modified_base 27: mod_base = OTHER; note = 2'-O-methylcytidine
  modified_base 28: mod_base = OTHER; note = 2'-fluorouridine
  modified_base 29: mod_base = OTHER; note = 2'-O-methylcytidine
  modified_base 30: mod_base = OTHER; note = 2'-fluoroadenosine
  modified_base 31: mod_base = OTHER; note = 2'-O-methylguanosine
  modified_base 32: mod_base = OTHER; note = 2'-fluorouridine
  modified_base 33: mod_base = OTHER; note = 2'-O-methylguanosine
  modified_base 34: mod_base = OTHER; note = 2'-fluoroadenosine
taaagcaaaacaggtctagcagtattctcagtga

SEQ ID NO: 110 - RNA, 33 nt, synthetic construct
  source 1..33: mol_type = other RNA
  modified_base 1: mod_base = OTHER; note = 2'-O-methyluridine phosphorothioate
  modified_base 2: mod_base = OTHER; note = 2'-fluoroguanosine phosphorothioate
  modified_base 3: mod_base = OTHER; note = 2'-O-methylcytidine
  modified_base 4: mod_base = OTHER; note = 2'-fluoroadenosine
  modified_base 5: mod_base = OTHER; note = 2'-O-methyladenosine
  modified_base 6: mod_base = OTHER; note = 2'-fluoroadenosine
  modified_base 7: mod_base = OTHER; note = 2'-O-methyladenosine
  modified_base 8: mod_base = OTHER; note = 2'-fluorocytidine
  modified_base 9: mod_base = OTHER; note = 2'-O-methyladenosine
  modified_base 10: mod_base = OTHER; note = 2'-fluoroguanosine
  modified_base 11: mod_base = OTHER; note = 2'-O-methylguanosine
  modified_base 12: mod_base = OTHER; note = 2'-fluorouridine
  modified_base 13: mod_base = OTHER; note = 2'-O-methylcytidine
  modified_base 14: mod_base = OTHER; note = 2'-fluorouridine phosphorothioate
  modified_base 15: mod_base = OTHER; note = 2'-O-methyladenosine phosphorothioate
  modified_base 16: mod_base = OTHER; note = 2'-fluoroguanosine phosphorothioate
  modified_base 17: mod_base = OTHER; note = 2'-O-methyladenosine phosphorothioate
  modified_base 18: mod_base = OTHER; note = 2'-fluoroadenosine phosphorothioate
  modified_base 20: mod_base = OTHER; note = 2'-O-methyladenosine phosphorothioate
  modified_base 21: mod_base = OTHER; note = 2'-fluorocytidine phosphorothioate
  modified_base 22: mod_base = OTHER; note = 2'-O-methylcytidine
  modified_base 23: mod_base = OTHER; note = 2'-fluorouridine
  modified_base 24: mod_base = OTHER; note = 2'-O-methylguanosine
  modified_base 25: mod_base = OTHER; note = 2'-fluorocytidine
  modified_base 26: mod_base = OTHER; note = 2'-O-methylcytidine
  modified_base 27: mod_base = OTHER; note = 2'-fluorouridine
  modified_base 28: mod_base = OTHER; note = 2'-O-methyladenosine
  modified_base 29: mod_base = OTHER; note = 2'-fluorouridine
  modified_base 30: mod_base = OTHER; note = 2'-O-methylcytidine
  modified_base 31: mod_base = OTHER; note = 2'-O-methylcytidine phosphorothioate
  modified_base 32: mod_base = OTHER; note = 2'-O-methyladenosine phosphorothioate
  modified_base 33: mod_base = OTHER; note = 2'-O-methyladenosine phosphorothioate trivalent N-acetyl-galactosamine
tgcaaaacaggtctagaaaacctgcctatccaa

SEQ ID NO: 111 - RNA, 33 nt, synthetic construct
  source 1..33: mol_type = other RNA
  modified_base 1: mod_base = OTHER; note = 2'-O-methyluridine phosphorothioate
  modified_base 2: mod_base = OTHER; note = 2'-fluoroadenosine phosphorothioate
  modified_base 3: mod_base = OTHER; note = 2'-O-methylguanosine
  modified_base 4: mod_base = OTHER; note = 2'-fluoroadenosine
  modified_base 5: mod_base = OTHER; note = 2'-O-methyladenosine
  modified_base 6: mod_base = OTHER; note = 2'-fluorouridine
  modified_base 7: mod_base = OTHER; note = 2'-O-methyladenosine
  modified_base 8: mod_base = OTHER; note = 2'-fluoroadenosine
  modified_base 9: mod_base = OTHER; note = 2'-O-methyladenosine
  modified_base 10: mod_base = OTHER; note = 2'-fluorouridine
  modified_base 11: mod_base = OTHER; note = 2'-O-methyladenosine
  modified_base 12: mod_base = OTHER; note = 2'-fluorouridine
  modified_base 13: mod_base = OTHER; note = 2'-O-methylcytidine
  modified_base 14: mod_base = OTHER; note = 2'-fluorouridine phosphorothioate
  modified_base 15: mod_base = OTHER; note = 2'-O-methyluridine phosphorothioate
  modified_base 16: mod_base = OTHER; note = 2'-fluorocytidine phosphorothioate
  modified_base 17: mod_base = OTHER; note = 2'-O-methyladenosine phosphorothioate
  modified_base 18: mod_base = OTHER; note = 2'-fluoroadenosine phosphorothioate
  modified_base 20: mod_base = OTHER; note = 2'-O-methyladenosine phosphorothioate
  modified_base 21: mod_base = OTHER; note = 2'-fluorocytidine phosphorothioate
  modified_base 22: mod_base = OTHER; note = 2'-O-methylcytidine
  modified_base 23: mod_base = OTHER; note = 2'-fluorouridine
  modified_base 24: mod_base = OTHER; note = 2'-O-methylguanosine
  modified_base 25: mod_base = OTHER; note = 2'-fluorocytidine
  modified_base 26: mod_base = OTHER; note = 2'-O-methylcytidine
  modified_base 27: mod_base = OTHER; note = 2'-fluorouridine
  modified_base 28: mod_base = OTHER; note = 2'-O-methyladenosine
  modified_base 29: mod_base = OTHER; note = 2'-fluorouridine
  modified_base 30: mod_base = OTHER; note = 2'-O-methylcytidine
  modified_base 31: mod_base = OTHER; note = 2'-O-methylcytidine phosphorothioate
  modified_base 32: mod_base = OTHER; note = 2'-O-methyladenosine phosphorothioate
  modified_base 33: mod_base = OTHER; note = 2'-O-methyladenosine phosphorothioate trivalent N-acetyl-galactosamine
tagaataaatatcttcaagacctgcctatccaa

SEQ ID NO: 112 - RNA, 33 nt, synthetic construct
  source 1..33: mol_type = other RNA
  modified_base 1: mod_base = OTHER; note = 2'-O-methyluridine phosphorothioate
  modified_base 2: mod_base = OTHER; note = 2'-fluoroguanosine phosphorothioate
  modified_base 3: mod_base = OTHER; note = 2'-O-methyluridine
  modified_base 4: mod_base = OTHER; note = 2'-fluoroguanosine
  modified_base 5: mod_base = OTHER; note = 2'-O-methyladenosine
  modified_base 6: mod_base = OTHER; note = 2'-fluorocytidine
  modified_base 7: mod_base = OTHER; note = 2'-O-methyladenosine
  modified_base 8: mod_base = OTHER; note = 2'-fluorocytidine
  modified_base 9: mod_base = OTHER; note = 2'-O-methyladenosine
  modified_base 10: mod_base = OTHER; note = 2'-fluoroadenosine
  modified_base 11: mod_base = OTHER; note = 2'-O-methyladenosine
  modified_base 12: mod_base = OTHER; note = 2'-fluoroguanosine
  modified_base 13: mod_base = OTHER; note = 2'-O-methylcytidine
  modified_base 14: mod_base = OTHER; note = 2'-fluoroadenosine phosphorothioate
  modified_base 15: mod_base = OTHER; note = 2'-O-methylguanosine phosphorothioate
  modified_base 16: mod_base = OTHER; note = 2'-fluoroguanosine phosphorothioate
  modified_base 17: mod_base = OTHER; note = 2'-O-methyluridine phosphorothioate
  modified_base 18: mod_base = OTHER; note = 2'-fluoroguanosine phosphorothioate
  modified_base 20: mod_base = OTHER; note = 2'-O-methylguanosine phosphorothioate
  modified_base 21: mod_base = OTHER; note = 2'-fluorouridine phosphorothioate
  modified_base 22: mod_base = OTHER; note = 2'-O-methyladenosine
  modified_base 23: mod_base = OTHER; note = 2'-fluorocytidine
  modified_base 24: mod_base = OTHER; note = 2'-O-methyluridine
  modified_base 25: mod_base = OTHER; note = 2'-fluorocytidine
  modified_base 26: mod_base = OTHER; note = 2'-O-methylcytidine
  modified_base 27: mod_base = OTHER; note = 2'-fluorouridine
  modified_base 28: mod_base = OTHER; note = 2'-O-methyluridine
  modified_base 29: mod_base = OTHER; note = 2'-fluoroguanosine
  modified_base 30: mod_base = OTHER; note = 2'-O-methyluridine
  modified_base 31: mod_base = OTHER; note = 2'-O-methyluridine phosphorothioate
  modified_base 32: mod_base = OTHER; note = 2'-O-methylguanosine phosphorothioate
  modified_base 33: mod_base = OTHER; note = 2'-O-methyladenosine phosphorothioate trivalent N-acetyl-galactosamine
tgtgacacaaagcaggtgcgtactccttgttga

SEQ ID NO: 113 - RNA, 33 nt, synthetic construct
  source 1..33: mol_type = other RNA
  modified_base 1: mod_base = OTHER; note = 2'-O-methyluridine phosphorothioate
  modified_base 2: mod_base = OTHER; note = 2'-fluoroguanosine phosphorothioate
  modified_base 3: mod_base = OTHER; note = 2'-O-methyluridine
  modified_base 4: mod_base = OTHER; note = 2'-fluoroguanosine
  modified_base 5: mod_base = OTHER; note = 2'-O-methyladenosine
  modified_base 6: mod_base = OTHER; note = 2'-fluorocytidine
  modified_base 7: mod_base = OTHER; note = 2'-O-methyladenosine
  modified_base 8: mod_base = OTHER; note = 2'-fluorocytidine
  modified_base 9: mod_base = OTHER; note = 2'-O-methyladenosine
  modified_base 10: mod_base = OTHER; note = 2'-fluoroadenosine
  modified_base 11: mod_base = OTHER; note = 2'-O-methyladenosine
  modified_base 12: mod_base = OTHER; note = 2'-fluoroguanosine
  modified_base 13: mod_base = OTHER; note = 2'-O-methylcytidine
  modified_base 14: mod_base = OTHER; note = 2'-fluoroadenosine phosphorothioate
  modified_base 15: mod_base = OTHER; note = 2'-O-methylguanosine phosphorothioate
  modified_base 16: mod_base = OTHER; note = 2'-fluoroguanosine phosphorothioate
  modified_base 17: mod_base = OTHER; note = 2'-O-methyluridine phosphorothioate
  modified_base 18: mod_base = OTHER; note = 2'-fluoroguanosine phosphorothioate
  modified_base 20: mod_base = OTHER; note = 2'-O-methyladenosine phosphorothioate
  modified_base 21: mod_base = OTHER; note = 2'-fluorocytidine phosphorothioate
  modified_base 22: mod_base = OTHER; note = 2'-O-methylcytidine
  modified_base 23: mod_base = OTHER; note = 2'-fluorouridine
  modified_base 24: mod_base = OTHER; note = 2'-O-methylguanosine
  modified_base 25: mod_base = OTHER; note = 2'-fluorocytidine
  modified_base 26: mod_base = OTHER; note = 2'-O-methylcytidine
  modified_base 27: mod_base = OTHER; note = 2'-fluorouridine
  modified_base 28: mod_base = OTHER; note = 2'-O-methyladenosine
  modified_base 29: mod_base = OTHER; note = 2'-fluorouridine
  modified_base 30: mod_base = OTHER; note = 2'-O-methylcytidine
  modified_base 31: mod_base = OTHER; note = 2'-O-methylcytidine phosphorothioate
  modified_base 32: mod_base = OTHER; note = 2'-O-methyladenosine phosphorothioate
  modified_base 33: mod_base = OTHER; note = 2'-O-methyladenosine phosphorothioate trivalent N-acetyl-galactosamine
tgtgacacaaagcaggtgcacctgcctatccaa

SEQ ID NO: 114 - RNA, 33 nt, synthetic construct
  source 1..33: mol_type = other RNA
  modified_base 1: mod_base = OTHER; note = 2'-O-methyluridine phosphorothioate
  modified_base 2: mod_base = OTHER; note = 2'-fluorocytidine phosphorothioate
  modified_base 3: mod_base = OTHER; note = 2'-O-methyluridine
  modified_base 4: mod_base = OTHER; note = 2'-fluorouridine
  modified_base 5: mod_base = OTHER; note = 2'-O-methylcytidine
  modified_base 6: mod_base = OTHER; note = 2'-fluoroadenosine
  modified_base 7: mod_base = OTHER; note = 2'-O-methyladenosine
  modified_base 8: mod_base = OTHER; note = 2'-fluoroguanosine
  modified_base 9: mod_base = OTHER; note = 2'-O-methyluridine
  modified_base 10: mod_base = OTHER; note = 2'-fluorouridine
  modified_base 11: mod_base = OTHER; note = 2'-O-methyladenosine
  modified_base 12: mod_base = OTHER; note = 2'-fluorocytidine phosphorothioate
  modified_base 13: mod_base = OTHER; note = 2'-O-methyladenosine phosphorothioate
  modified_base 14: mod_base = OTHER; note = 2'-fluoroadenosine phosphorothioate
  modified_base 15: mod_base = OTHER; note = 2'-O-methyladenosine phosphorothioate
  modified_base 16: mod_base = OTHER; note = 2'-fluoroadenosine phosphorothioate
  modified_base 17: mod_base = OTHER; note = 2'-O-methylguanosine phosphorothioate
  modified_base 18: mod_base = OTHER; note = 2'-fluorocytidine phosphorothioate
  modified_base 20: mod_base = OTHER; note = 2'-O-methylguanosine phosphorothioate
  modified_base 21: mod_base = OTHER; note = 2'-fluorouridine phosphorothioate
  modified_base 22: mod_base = OTHER; note = 2'-O-methyladenosine
  modified_base 23: mod_base = OTHER; note = 2'-fluorouridine
  modified_base 24: mod_base = OTHER; note = 2'-O-methyluridine
  modified_base 25: mod_base = OTHER; note = 2'-fluorocytidine
  modified_base 26: mod_base = OTHER; note = 2'-O-methyluridine
  modified_base 27: mod_base = OTHER; note = 2'-fluorocytidine
  modified_base 28: mod_base = OTHER; note = 2'-O-methyladenosine
  modified_base 29: mod_base = OTHER; note = 2'-fluoroguanosine
  modified_base 30: mod_base = OTHER; note = 2'-O-methyluridine
  modified_base 31: mod_base = OTHER; note = 2'-fluoroguanosine phosphorothioate
  modified_base 32: mod_base = OTHER; note = 2'-O-methylcytidine phosphorothioate
  modified_base 33: mod_base = OTHER; note = 2'-fluoroadenosine phosphorothioate trivalent N-acetyl-galactosamine
tcttcaagttacaaaagcagtattctcagtgca

SEQ ID NO: 115 - RNA, 34 nt, synthetic construct
  source 1..34: mol_type = other RNA
  modified_base 1: mod_base = OTHER; note = Phosphate 2'-O-methyluridine, wherein phosphate may be absent
  modified_base 2: mod_base = OTHER; note = 2'-fluorouridine
  modified_base 3: mod_base = OTHER; note = 2'-O-methylguanosine
  modified_base 4: mod_base = OTHER; note = 2'-fluoroguanosine
  modified_base 5: mod_base = OTHER; note = 2'-O-methyladenosine
  modified_base 6: mod_base = OTHER; note = 2'-fluorouridine
  modified_base 7: mod_base = OTHER; note = 2'-O-methyladenosine
  modified_base 8: mod_base = OTHER; note = 2'-fluoroguanosine
  modified_base 9: mod_base = OTHER; note = 2'-O-methylguanosine
  modified_base 10: mod_base = OTHER; note = 2'-fluorocytidine
  modified_base 11: mod_base = OTHER; note = 2'-O-methyladenosine
  modified_base 12: mod_base = OTHER; note = 2'-fluoroguanosine
  modified_base 13: mod_base = OTHER; note = 2'-O-methylguanosine
  modified_base 14: mod_base = OTHER; note = 2'-fluorouridine
  modified_base 15: mod_base = OTHER; note = 2'-O-methylguanosine
  modified_base 16: mod_base = OTHER; note = 2'-fluoroguanosine
  modified_base 17: mod_base = OTHER; note = 2'-O-methyladenosine
  modified_base 18: mod_base = OTHER; note = 2'-fluorocytidine
  modified_base 19: mod_base = OTHER; note = 2'-O-methyluridine
  modified_base 20: mod_base = OTHER; note = 2'-fluorouridine
  modified_base 21: mod_base = OTHER; note = 2'-O-methyluridine
  modified_base 22: mod_base = OTHER; note = 2'-fluorouridine
  modified_base 23: mod_base = OTHER; note = 2'-O-methylguanosine
  modified_base 24: mod_base = OTHER; note = 2'-fluorouridine
  modified_base 25: mod_base = OTHER; note = 2'-O-methyladenosine
  modified_base 26: mod_base = OTHER; note = 2'-fluoroadenosine
  modified_base 27: mod_base = OTHER; note = 2'-O-methylcytidine
  modified_base 28: mod_base = OTHER; note = 2'-fluorouridine
  modified_base 29: mod_base = OTHER; note = 2'-O-methyluridine
  modified_base 30: mod_base = OTHER; note = 2'-fluoroguanosine
  modified_base 31: mod_base = OTHER; note = 2'-O-methyladenosine
  modified_base 32: mod_base = OTHER; note = 2'-fluoroadenosine
  modified_base 33: mod_base = OTHER; note = 2'-O-methylguanosine
  modified_base 34: mod_base = OTHER; note = 2'-fluoroadenosine
ttggataggcaggtggacttttgtaacttgaaga

SEQ ID NO: 116 - RNA, 34 nt, synthetic construct
  source 1..34: mol_type = other RNA
  modified_base 1: mod_base = OTHER; note = Phosphate 2'-O-methyluridine, wherein phosphate may be absent
  modified_base 2: mod_base = OTHER; note = 2'-fluorouridine
  modified_base 3: mod_base = OTHER; note = 2'-O-methylguanosine
  modified_base 4: mod_base = OTHER; note = 2'-fluoroguanosine
  modified_base 5: mod_base = OTHER; note = 2'-O-methyladenosine
  modified_base 6: mod_base = OTHER; note = 2'-fluorouridine
  modified_base 7: mod_base = OTHER; note = 2'-O-methyladenosine
  modified_base 8: mod_base = OTHER; note = 2'-fluoroguanosine
  modified_base 9: mod_base = OTHER; note = 2'-O-methylguanosine
  modified_base 10: mod_base = OTHER; note = 2'-fluorocytidine
  modified_base 11: mod_base = OTHER; note = 2'-O-methyladenosine
  modified_base 12: mod_base = OTHER; note = 2'-fluoroguanosine
  modified_base 13: mod_base = OTHER; note = 2'-O-methylguanosine
  modified_base 14: mod_base = OTHER; note = 2'-fluorouridine
  modified_base 15: mod_base = OTHER; note = 2'-O-methylguanosine
  modified_base 16: mod_base = OTHER; note = 2'-fluoroguanosine
  modified_base 17: mod_base = OTHER; note = 2'-O-methyladenosine
  modified_base 18: mod_base = OTHER; note = 2'-fluorocytidine
  modified_base 19: mod_base = OTHER; note = 2'-O-methyluridine
  modified_base 20: mod_base = OTHER; note = 2'-fluorocytidine
  modified_base 21: mod_base = OTHER; note = 2'-O-methylcytidine
  modified_base 22: mod_base = OTHER; note = 2'-fluorouridine
  modified_base 23: mod_base = OTHER; note = 2'-O-methylguanosine
  modified_base 24: mod_base = OTHER; note = 2'-fluorouridine
  modified_base 25: mod_base = OTHER; note = 2'-O-methyluridine
  modified_base 26: mod_base = OTHER; note = 2'-fluorouridine
  modified_base 27: mod_base = OTHER; note = 2'-O-methyluridine
  modified_base 28: mod_base = OTHER; note = 2'-fluoroguanosine
  modified_base 29: mod_base = OTHER; note = 2'-O-methylcytidine
  modified_base 30: mod_base = OTHER; note = 2'-fluorouridine
  modified_base 31: mod_base = OTHER; note = 2'-O-methyluridine
  modified_base 32: mod_base = OTHER; note = 2'-fluorouridine
  modified_base 33: mod_base = OTHER; note = 2'-O-methyluridine
  modified_base 34: mod_base = OTHER; note = 2'-fluoroadenosine
ttggataggcaggtggactcctgttttgctttta

SEQ ID NO: 117 - RNA, 34 nt, synthetic construct
  source 1..34: mol_type = other RNA
  modified_base 1: mod_base = OTHER; note = Phosphate 2'-O-methyluridine, wherein phosphate may be absent
  modified_base 2: mod_base = OTHER; note = 2'-fluorouridine
  modified_base 3: mod_base = OTHER; note = 2'-O-methylguanosine
  modified_base 4: mod_base = OTHER; note = 2'-fluoroguanosine
  modified_base 5: mod_base = OTHER; note = 2'-O-methyladenosine
  modified_base 6: mod_base = OTHER; note = 2'-fluorouridine
  modified_base 7: mod_base = OTHER; note = 2'-O-methyladenosine
  modified_base 8: mod_base = OTHER; note = 2'-fluoroguanosine
  modified_base 9: mod_base = OTHER; note = 2'-O-methylguanosine
  modified_base 10: mod_base = OTHER; note = 2'-fluorocytidine
  modified_base 11: mod_base = OTHER; note = 2'-O-methyladenosine
  modified_base 12: mod_base = OTHER; note = 2'-fluoroguanosine
  modified_base 13: mod_base = OTHER; note = 2'-O-methylguanosine
  modified_base 14: mod_base = OTHER; note = 2'-fluorouridine
  modified_base 15: mod_base = OTHER; note = 2'-O-methylguanosine
  modified_base 16: mod_base = OTHER; note = 2'-fluoroguanosine
  modified_base 17: mod_base = OTHER; note = 2'-O-methyladenosine
  modified_base 18: mod_base = OTHER; note = 2'-fluorocytidine
  modified_base 19: mod_base = OTHER; note = 2'-O-methyluridine
  modified_base 20: mod_base = OTHER; note = 2'-fluorouridine
  modified_base 21: mod_base = OTHER; note = 2'-O-methylguanosine
  modified_base 22: mod_base = OTHER; note = 2'-fluorouridine
  modified_base 23: mod_base = OTHER; note = 2'-O-methyluridine
  modified_base 24: mod_base = OTHER; note = 2'-fluorouridine
  modified_base 25: mod_base = OTHER; note = 2'-O-methyluridine
  modified_base 26: mod_base = OTHER; note = 2'-fluoroguanosine
  modified_base 27: mod_base = OTHER; note = 2'-O-methylcytidine
  modified_base 28: mod_base = OTHER; note = 2'-fluorouridine
  modified_base 29: mod_base = OTHER; note = 2'-O-methyluridine
  modified_base 30: mod_base = OTHER; note = 2'-fluorouridine
  modified_base 31: mod_base = OTHER; note = 2'-O-methyluridine
  modified_base 32: mod_base = OTHER; note = 2'-fluoroguanosine
  modified_base 33: mod_base = OTHER; note = 2'-O-methyluridine
  modified_base 34: mod_base = OTHER; note = 2'-fluoroadenosine
ttggataggcaggtggacttgttttgcttttgta

SEQ ID NO: 118 - RNA, 34 nt, synthetic construct
  source 1..34: mol_type = other RNA
  modified_base 1: mod_base = OTHER; note = Phosphate 2'-O-methyluridine, wherein phosphate may be absent
  modified_base 2: mod_base = OTHER; note = 2'-fluorouridine
  modified_base 3: mod_base = OTHER; note = 2'-O-methylguanosine
  modified_base 4: mod_base = OTHER; note = 2'-fluoroguanosine
  modified_base 5: mod_base = OTHER; note = 2'-O-methyladenosine
  modified_base 6: mod_base = OTHER; note = 2'-fluorouridine
  modified_base 7: mod_base = OTHER; note = 2'-O-methyladenosine
  modified_base 8: mod_base = OTHER; note = 2'-fluoroguanosine
  modified_base 9: mod_base = OTHER; note = 2'-O-methylguanosine
  modified_base 10: mod_base = OTHER; note = 2'-fluorocytidine
  modified_base 11: mod_base = OTHER; note = 2'-O-methyladenosine
  modified_base 12: mod_base = OTHER; note = 2'-fluoroguanosine
  modified_base 13: mod_base = OTHER; note = 2'-O-methylguanosine
  modified_base 14: mod_base = OTHER; note = 2'-fluorouridine
  modified_base 15: mod_base = OTHER; note = 2'-O-methylguanosine
  modified_base 16: mod_base = OTHER; note = 2'-fluoroguanosine
  modified_base 17: mod_base = OTHER; note = 2'-O-methyladenosine
  modified_base 18: mod_base = OTHER; note = 2'-fluorocytidine
  modified_base 19: mod_base = OTHER; note = 2'-O-methyluridine
  modified_base 20: mod_base = OTHER; note = 2'-fluorouridine
  modified_base 21: mod_base = OTHER; note = 2'-O-methyladenosine
  modified_base 22: mod_base = OTHER; note = 2'-fluoroguanosine
  modified_base 23: mod_base = OTHER; note = 2'-O-methyladenosine
  modified_base 24: mod_base = OTHER; note = 2'-fluorocytidine
  modified_base 25: mod_base = OTHER; note = 2'-O-methylcytidine
  modified_base 26: mod_base = OTHER; note = 2'-fluorouridine
  modified_base 27: mod_base = OTHER; note = 2'-O-methylguanosine
  modified_base 28: mod_base = OTHER; note = 2'-fluorouridine
  modified_base 29: mod_base = OTHER; note = 2'-O-methyluridine
  modified_base 30: mod_base = OTHER; note = 2'-fluorouridine
  modified_base 31: mod_base = OTHER; note = 2'-O-methyluridine
  modified_base 32: mod_base = OTHER; note = 2'-fluoroguanosine
  modified_base 33: mod_base = OTHER; note = 2'-O-methylcytidine
  modified_base 34: mod_base = OTHER; note = 2'-fluoroadenosine
ttggataggcaggtggacttagacctgttttgca

SEQ ID NO: 119 - RNA, 34 nt, synthetic construct
  source 1..34: mol_type = other RNA
  modified_base 1: mod_base = OTHER; note = Phosphate 2'-O-methyluridine, wherein phosphate may be absent
  modified_base 2: mod_base = OTHER; note = 2'-fluorouridine
  modified_base 3: mod_base = OTHER; note = 2'-O-methylguanosine
  modified_base 4: mod_base = OTHER; note = 2'-fluoroguanosine
  modified_base 5: mod_base = OTHER; note = 2'-O-methyladenosine
  modified_base 6: mod_base = OTHER; note = 2'-fluorouridine
  modified_base 7: mod_base = OTHER; note = 2'-O-methyladenosine
  modified_base 8: mod_base = OTHER; note = 2'-fluoroguanosine
  modified_base 9: mod_base = OTHER; note = 2'-O-methylguanosine
  modified_base 10: mod_base = OTHER; note = 2'-fluorocytidine
  modified_base 11: mod_base = OTHER; note = 2'-O-methyladenosine
  modified_base 12: mod_base = OTHER; note = 2'-fluoroguanosine
  modified_base 13: mod_base = OTHER; note = 2'-O-methylguanosine
  modified_base 14: mod_base = OTHER; note = 2'-fluorouridine
  modified_base 15: mod_base = OTHER; note = 2'-O-methylguanosine
  modified_base 16: mod_base = OTHER; note = 2'-fluoroguanosine
  modified_base 17: mod_base = OTHER; note = 2'-O-methyladenosine
  modified_base 18: mod_base = OTHER; note = 2'-fluorocytidine
  modified_base 19: mod_base = OTHER; note = 2'-O-methyluridine
  modified_base 20: mod_base = OTHER; note = 2'-fluorocytidine
  modified_base 21: mod_base = OTHER; note = 2'-O-methyluridine
  modified_base 22: mod_base = OTHER; note = 2'-fluoroguanosine
  modified_base 23: mod_base = OTHER; note = 2'-O-methyluridine
  modified_base 24: mod_base = OTHER; note = 2'-fluorouridine
  modified_base 25: mod_base = OTHER; note = 2'-O-methyluridine
  modified_base 26: mod_base = OTHER; note = 2'-fluorouridine
  modified_base 27: mod_base = OTHER; note = 2'-O-methylguanosine
  modified_base 28: mod_base = OTHER; note = 2'-fluorocytidine
  modified_base 29: mod_base = OTHER; note = 2'-O-methyluridine
  modified_base 30: mod_base = OTHER; note = 2'-fluorouridine
  modified_base 31: mod_base = OTHER; note = 2'-O-methyluridine
  modified_base 32: mod_base = OTHER; note = 2'-fluorouridine
  modified_base 33: mod_base = OTHER; note = 2'-O-methylguanosine
  modified_base 34: mod_base = OTHER; note = 2'-fluoroadenosine
ttggataggcaggtggactctgttttgcttttga

SEQ ID NO: 120 - RNA, 34 nt, synthetic construct
  source 1..34: mol_type = other RNA
  modified_base 1: mod_base = OTHER; note = Phosphate 2'-O-methyluridine, wherein phosphate may be absent
  modified_base 2: mod_base = OTHER; note = 2'-fluorouridine
  modified_base 3: mod_base = OTHER; note = 2'-O-methylguanosine
  modified_base 4: mod_base = OTHER; note = 2'-fluoroguanosine
  modified_base 5: mod_base = OTHER; note = 2'-O-methyladenosine
  modified_base 6: mod_base = OTHER; note = 2'-fluorouridine
  modified_base 7: mod_base = OTHER; note = 2'-O-methyladenosine
  modified_base 8: mod_base = OTHER; note = 2'-fluoroguanosine
  modified_base 9: mod_base = OTHER; note = 2'-O-methylguanosine
  modified_base 10: mod_base = OTHER; note = 2'-fluorocytidine
  modified_base 11: mod_base = OTHER; note = 2'-O-methyladenosine
  modified_base 12: mod_base = OTHER; note = 2'-fluoroguanosine
  modified_base 13: mod_base = OTHER; note = 2'-O-methylguanosine
  modified_base 14: mod_base = OTHER; note = 2'-fluorouridine
  modified_base 15: mod_base = OTHER; note = 2'-O-methylguanosine
  modified_base 16: mod_base = OTHER; note = 2'-fluoroguanosine
  modified_base 17: mod_base = OTHER; note = 2'-O-methyladenosine
  modified_base 18: mod_base = OTHER; note = 2'-fluorocytidine
  modified_base 19: mod_base = OTHER; note = 2'-O-methyluridine
  modified_base 20: mod_base = OTHER; note = 2'-fluoroadenosine
  modified_base 21: mod_base = OTHER; note = 2'-O-methyladenosine
  modified_base 22: mod_base = OTHER; note = 2'-fluoroguanosine
  modified_base 23: mod_base = OTHER; note = 2'-O-methyladenosine
  modified_base 24: mod_base = OTHER; note = 2'-fluorouridine
  modified_base 25: mod_base = OTHER; note = 2'-O-methyladenosine
  modified_base 26: mod_base = OTHER; note = 2'-fluorouridine
  modified_base 27: mod_base = OTHER; note = 2'-O-methyluridine
  modified_base 28: mod_base = OTHER; note = 2'-fluorouridine
  modified_base 29: mod_base = OTHER; note = 2'-O-methyladenosine
  modified_base 30: mod_base = OTHER; note = 2'-fluorouridine
  modified_base 31: mod_base = OTHER; note = 2'-O-methyluridine
  modified_base 32: mod_base = OTHER; note = 2'-fluorocytidine
  modified_base 33: mod_base = OTHER; note = 2'-O-methyluridine
  modified_base 34: mod_base = OTHER; note = 2'-fluoroadenosine
ttggataggcaggtggactaagatatttattcta

SEQ ID NO: 121 - RNA, 34 nt, synthetic construct
  source 1..34: mol_type = other RNA
  modified_base 1: mod_base = OTHER; note = Phosphate 2'-O-methyluridine, wherein phosphate may be absent
  modified_base 2: mod_base = OTHER; note = 2'-fluorouridine
  modified_base 3: mod_base = OTHER; note = 2'-O-methylguanosine
  modified_base 4: mod_base = OTHER; note = 2'-fluoroguanosine
  modified_base 5: mod_base = OTHER; note = 2'-O-methyladenosine
  modified_base 6: mod_base = OTHER; note = 2'-fluorouridine
  modified_base 7: mod_base = OTHER; note = 2'-O-methyladenosine
  modified_base 8: mod_base = OTHER; note = 2'-fluoroguanosine
  modified_base 9: mod_base = OTHER; note = 2'-O-methylguanosine
  modified_base 10: mod_base = OTHER; note = 2'-fluorocytidine
  modified_base 11: mod_base = OTHER; note = 2'-O-methyladenosine
  modified_base 12: mod_base = OTHER; note = 2'-fluoroguanosine
  modified_base 13: mod_base = OTHER; note = 2'-O-methylguanosine
  modified_base 14: mod_base = OTHER; note = 2'-fluorouridine
  modified_base 15: mod_base = OTHER; note = 2'-O-methylguanosine
  modified_base 16: mod_base = OTHER; note = 2'-fluoroguanosine
  modified_base 17: mod_base = OTHER; note = 2'-O-methyladenosine
  modified_base 18: mod_base = OTHER; note = 2'-fluorocytidine
  modified_base 19: mod_base = OTHER; note = 2'-O-methyluridine
  modified_base 20: mod_base = OTHER; note = 2'-fluoroadenosine
  modified_base 21: mod_base = OTHER; note = 2'-O-methylcytidine
  modified_base 22: mod_base = OTHER; note = 2'-fluorocytidine
  modified_base 23: mod_base = OTHER; note = 2'-O-methyluridine
  modified_base 24: mod_base = OTHER; note = 2'-fluoroguanosine
  modified_base 25: mod_base = OTHER; note = 2'-O-methyluridine
  modified_base 26: mod_base = OTHER; note = 2'-fluorouridine
  modified_base 27: mod_base = OTHER; note = 2'-O-methyluridine
  modified_base 28: mod_base = OTHER; note = 2'-fluorouridine
  modified_base 29: mod_base = OTHER; note = 2'-O-methylguanosine
  modified_base 30: mod_base = OTHER; note = 2'-fluorocytidine
  modified_base 31: mod_base = OTHER; note = 2'-O-methyluridine
  modified_base 32: mod_base = OTHER; note = 2'-fluorouridine
  modified_base 33: mod_base = OTHER; note = 2'-O-methyluridine
  modified_base 34: mod_base = OTHER; note = 2'-fluoroadenosine
ttggataggcaggtggactacctgttttgcttta

SEQ ID NO: 122 - RNA, 34 nt, synthetic construct
  source 1..34: mol_type = other RNA
  modified_base 1: mod_base = OTHER; note = Phosphate 2'-O-methyluridine, wherein phosphate may be absent
  modified_base 2: mod_base = OTHER; note = 2'-fluoroguanosine
  modified_base 3: mod_base = OTHER; note = 2'-O-methylcytidine
  modified_base 4: mod_base = OTHER; note = 2'-fluoroadenosine
  modified_base 5: mod_base = OTHER; note = 2'-O-methylcytidine
  modified_base 6: mod_base = OTHER; note = 2'-fluorouridine
  modified_base 7: mod_base = OTHER; note = 2'-O-methylguanosine
  modified_base 8: mod_base = OTHER; note = 2'-fluoroadenosine
  modified_base 9: mod_base = OTHER; note = 2'-O-methylguanosine
  modified_base 10: mod_base = OTHER; note = 2'-fluoroadenosine
  modified_base 11: mod_base = OTHER; note = 2'-O-methyladenosine
  modified_base 12: mod_base = OTHER; note = 2'-fluorouridine
  modified_base 13: mod_base = OTHER; note = 2'-O-methyladenosine
  modified_base 14: mod_base = OTHER; note = 2'-fluorocytidine
  modified_base 15: mod_base = OTHER; note = 2'-O-methyluridine
  modified_base 16: mod_base = OTHER; note = 2'-fluoroguanosine
  modified_base 17: mod_base = OTHER; note = 2'-O-methyluridine
  modified_base 18: mod_base = OTHER; note = 2'-fluorocytidine
  modified_base 19: mod_base = OTHER; note = 2'-O-methylcytidine
  modified_base 20: mod_base = OTHER; note = 2'-fluorouridine
  modified_base 21: mod_base = OTHER; note = 2'-O-methyluridine
  modified_base 22: mod_base = OTHER; note = 2'-fluorouridine
  modified_base 23: mod_base = OTHER; note = 2'-O-methylguanosine
  modified_base 24: mod_base = OTHER; note = 2'-fluorouridine
  modified_base 25: mod_base = OTHER; note = 2'-O-methyladenosine
  modified_base 26: mod_base = OTHER; note = 2'-fluoroadenosine
  modified_base 27: mod_base = OTHER; note = 2'-O-methylcytidine
  modified_base 28: mod_base = OTHER; note = 2'-fluorouridine
  modified_base 29: mod_base = OTHER; note = 2'-O-methyluridine
  modified_base 30: mod_base = OTHER; note = 2'-fluoroguanosine
  modified_base 31: mod_base = OTHER; note = 2'-O-methyladenosine
  modified_base 32: mod_base = OTHER; note = 2'-fluoroadenosine
  modified_base 33: mod_base = OTHER; note = 2'-O-methylguanosine
  modified_base 34: mod_base = OTHER; note = 2'-fluoroadenosine
tgcactgagaatactgtcctttgtaacttgaaga

SEQ ID NO: 123 - RNA, 34 nt, synthetic construct
  source 1..34: mol_type = other RNA
  modified_base 1: mod_base = OTHER; note = Phosphate 2'-O-methyluridine, wherein phosphate may be absent
  modified_base 2: mod_base = OTHER; note = 2'-fluoroguanosine
  modified_base 3: mod_base = OTHER; note = 2'-O-methylcytidine
  modified_base 4: mod_base = OTHER; note = 2'-fluoroadenosine
  modified_base 5: mod_base = OTHER; note = 2'-O-methylcytidine
  modified_base 6: mod_base = OTHER; note = 2'-fluorouridine
  modified_base 7: mod_base = OTHER; note = 2'-O-methylguanosine
  modified_base 8: mod_base = OTHER; note = 2'-fluoroadenosine
  modified_base 9: mod_base = OTHER; note = 2'-O-methylguanosine
  modified_base 10: mod_base = OTHER; note = 2'-fluoroadenosine
  modified_base 11: mod_base = OTHER; note = 2'-O-methyladenosine
  modified_base 12: mod_base = OTHER; note = 2'-fluorouridine
  modified_base 13: mod_base = OTHER; note = 2'-O-methyladenosine
  modified_base 14: mod_base = OTHER; note = 2'-fluorocytidine
  modified_base 15: mod_base = OTHER; note = 2'-O-methyluridine
  modified_base 16: mod_base = OTHER; note = 2'-fluoroguanosine
  modified_base 17: mod_base = OTHER; note = 2'-O-methyluridine
  modified_base 18: mod_base = OTHER; note = 2'-fluorocytidine
  modified_base 19: mod_base = OTHER; note = 2'-O-methylcytidine
  modified_base 20: mod_base = OTHER; note = 2'-fluorocytidine
  modified_base 21: mod_base = OTHER; note = 2'-O-methylcytidine
  modified_base 22: mod_base = OTHER; note = 2'-fluorouridine
  modified_base 23: mod_base = OTHER; note = 2'-O-methylguanosine
  modified_base 24: mod_base = OTHER; note = 2'-fluorouridine
  modified_base 25: mod_base = OTHER; note = 2'-O-methyluridine
  modified_base 26: mod_base = OTHER; note = 2'-fluorouridine
  modified_base 27: mod_base = OTHER; note = 2'-O-methyluridine
  modified_base 28: mod_base = OTHER; note = 2'-fluoroguanosine
  modified_base 29: mod_base = OTHER; note = 2'-O-methylcytidine
  modified_base 30: mod_base = OTHER; note = 2'-fluorouridine
  modified_base 31: mod_base = OTHER; note = 2'-O-methyluridine
  modified_base 32: mod_base = OTHER; note = 2'-fluorouridine
  modified_base 33: mod_base = OTHER; note = 2'-O-methyluridine
  modified_base 34: mod_base = OTHER; note = 2'-fluoroadenosine
tgcactgagaatactgtcccctgttttgctttta

SEQ ID NO: 124 - RNA, 34 nt, synthetic construct
  source 1..34: mol_type = other RNA
  modified_base 1: mod_base = OTHER; note = Phosphate 2'-O-methyluridine, wherein phosphate may be absent
  modified_base 2: mod_base = OTHER; note = 2'-fluoroguanosine
  modified_base 3: mod_base = OTHER; note = 2'-O-methylcytidine
  modified_base 4: mod_base = OTHER; note = 2'-fluoroadenosine
  modified_base 5: mod_base = OTHER; note = 2'-O-methylcytidine
  modified_base 6: mod_base = OTHER; note = 2'-fluorouridine
  modified_base 7: mod_base = OTHER; note = 2'-O-methylguanosine
  modified_base 8: mod_base = OTHER; note = 2'-fluoroadenosine
  modified_base 9: mod_base = OTHER; note = 2'-O-methylguanosine
  modified_base 10: mod_base = OTHER; note = 2'-fluoroadenosine
  modified_base 11: mod_base = OTHER; note = 2'-O-methyladenosine
  modified_base 12: mod_base = OTHER; note = 2'-fluorouridine
  modified_base 13: mod_base = OTHER; note = 2'-O-methyladenosine
  modified_base 14: mod_base = OTHER; note = 2'-fluorocytidine
  modified_base 15: mod_base = OTHER; note = 2'-O-methyluridine
  modified_base 16: mod_base = OTHER; note = 2'-fluoroguanosine
  modified_base 17: mod_base = OTHER; note = 2'-O-methyluridine
  modified_base 18: mod_base = OTHER; note = 2'-fluorocytidine
  modified_base 19: mod_base = OTHER; note = 2'-O-methylcytidine
  modified_base 20: mod_base = OTHER; note = 2'-fluorouridine
  modified_base 21: mod_base = OTHER; note = 2'-O-methylguanosine
  modified_base 22: mod_base = OTHER; note = 2'-fluorouridine
  modified_base 23: mod_base = OTHER; note = 2'-O-methyluridine
  modified_base 24: mod_base = OTHER; note = 2'-fluorouridine
  modified_base 25: mod_base = OTHER; note = 2'-O-methyluridine
  modified_base 26: mod_base = OTHER; note = 2'-fluoroguanosine
  modified_base 27: mod_base = OTHER; note = 2'-O-methylcytidine
  modified_base 28: mod_base = OTHER; note = 2'-fluorouridine
  modified_base 29: mod_base = OTHER; note = 2'-O-methyluridine
  modified_base 30: mod_base = OTHER; note = 2'-fluorouridine
  modified_base 31: mod_base = OTHER; note = 2'-O-methyluridine
  modified_base 32: mod_base = OTHER; note = 2'-fluoroguanosine
  modified_base 33: mod_base = OTHER; note = 2'-O-methyluridine
  modified_base 34: mod_base = OTHER; note = 2'-fluoroadenosine
tgcactgagaatactgtcctgttttgcttttgta

SEQ ID NO: 125 - RNA, 34 nt, synthetic construct
  source 1..34: mol_type = other RNA
  modified_base 1: mod_base = OTHER; note = Phosphate 2'-O-methyluridine, wherein phosphate may be absent
  modified_base 2: mod_base = OTHER; note = 2'-fluoroguanosine
  modified_base 3: mod_base = OTHER; note = 2'-O-methylcytidine
  modified_base 4: mod_base = OTHER; note = 2'-fluoroadenosine
  modified_base 5: mod_base = OTHER; note = 2'-O-methylcytidine
  modified_base 6: mod_base = OTHER; note = 2'-fluorouridine
  modified_base 7: mod_base = OTHER; note = 2'-O-methylguanosine
  modified_base 8: mod_base = OTHER; note = 2'-fluoroadenosine
  modified_base 9: mod_base = OTHER; note = 2'-O-methylguanosine
  modified_base 10: mod_base = OTHER; note = 2'-fluoroadenosine
  modified_base 11: mod_base = OTHER; note = 2'-O-methyladenosine
  modified_base 12: mod_base = OTHER; note = 2'-fluorouridine
  modified_base 13: mod_base = OTHER; note = 2'-O-methyladenosine
  modified_base 14: mod_base = OTHER; note = 2'-fluorocytidine
  modified_base 15: mod_base = OTHER; note = 2'-O-methyluridine
  modified_base 16: mod_base = OTHER; note = 2'-fluoroguanosine
  modified_base 17: mod_base = OTHER; note = 2'-O-methyluridine
  modified_base 18: mod_base = OTHER; note = 2'-fluorocytidine
  modified_base 19: mod_base = OTHER; note = 2'-O-methylcytidine
  modified_base 20: mod_base = OTHER; note = 2'-fluorouridine
  modified_base 21: mod_base = OTHER; note = 2'-O-methyladenosine
  modified_base 22: mod_base = OTHER; note = 2'-fluoroguanosine
  modified_base 23: mod_base = OTHER; note = 2'-O-methyladenosine
  modified_base 24: mod_base = OTHER; note = 2'-fluorocytidine
  modified_base 25: mod_base = OTHER; note = 2'-O-methylcytidine
  modified_base 26: mod_base = OTHER; note = 2'-fluorouridine
  modified_base 27: mod_base = OTHER; note = 2'-O-methylguanosine
  modified_base 28: mod_base = OTHER; note = 2'-fluorouridine
  modified_base 29: mod_base = OTHER; note = 2'-O-methyluridine
  modified_base 30: mod_base = OTHER; note = 2'-fluorouridine
  modified_base 31: mod_base = OTHER; note = 2'-O-methyluridine
  modified_base 32: mod_base = OTHER; note = 2'-fluoroguanosine
  modified_base 33: mod_base = OTHER; note = 2'-O-methylcytidine
  modified_base 34: mod_base = OTHER; note = 2'-fluoroadenosine
tgcactgagaatactgtcctagacctgttttgca

SEQ ID NO: 126 - RNA, 34 nt, synthetic construct
  source 1..34: mol_type = other RNA
  modified_base 1: mod_base = OTHER; note = Phosphate 2'-O-methyluridine, wherein phosphate may be absent
  modified_base 2: mod_base = OTHER; note = 2'-fluoroguanosine
  modified_base 3: mod_base = OTHER; note = 2'-O-methylcytidine
  modified_base 4: mod_base = OTHER; note = 2'-fluoroadenosine
  modified_base 5: mod_base = OTHER; note = 2'-O-methylcytidine
  modified_base 6: mod_base = OTHER; note = 2'-fluorouridine
  modified_base 7: mod_base = OTHER; note = 2'-O-methylguanosine
  modified_base 8: mod_base = OTHER; note = 2'-fluoroadenosine
  modified_base 9: mod_base = OTHER; note = 2'-O-methylguanosine
  modified_base 10: mod_base = OTHER; note = 2'-fluoroadenosine
  modified_base 11: mod_base = OTHER; note = 2'-O-methyladenosine
  modified_base 12: mod_base = OTHER; note = 2'-fluorouridine
  modified_base 13: mod_base = OTHER; note = 2'-O-methyladenosine
  modified_base 14: mod_base = OTHER; note = 2'-fluorocytidine
  modified_base 15: mod_base = OTHER; note = 2'-O-methyluridine
  modified_base 16: mod_base = OTHER; note = 2'-fluoroguanosine
  modified_base 17: mod_base = OTHER; note = 2'-O-methyluridine
  modified_base 18: mod_base = OTHER; note = 2'-fluorocytidine
  modified_base 19: mod_base = OTHER; note = 2'-O-methylcytidine
  modified_base 20: mod_base = OTHER; note = 2'-fluorocytidine
  modified_base 21: mod_base = OTHER; note = 2'-O-methyluridine
  modified_base 22: mod_base = OTHER; note = 2'-fluoroguanosine
  modified_base 23: mod_base = OTHER; note = 2'-O-methyluridine
  modified_base 24: mod_base = OTHER; note = 2'-fluorouridine
  modified_base 25: mod_base = OTHER; note = 2'-O-methyluridine
  modified_base 26: mod_base = OTHER; note = 2'-fluorouridine
  modified_base 27: mod_base = OTHER; note = 2'-O-methylguanosine
  modified_base 28: mod_base = OTHER; note = 2'-fluorocytidine
  modified_base 29: mod_base = OTHER; note = 2'-O-methyluridine
  modified_base 30: mod_base = OTHER; note = 2'-fluorouridine
  modified_base 31: mod_base = OTHER; note = 2'-O-methyluridine
  modified_base 32: mod_base = OTHER; note = 2'-fluorouridine
  modified_base 33: mod_base = OTHER; note = 2'-O-methylguanosine
  modified_base 34: mod_base = OTHER; note = 2'-fluoroadenosine
tgcactgagaatactgtccctgttttgcttttga

SEQ ID NO: 127 - RNA, 34 nt, synthetic construct
  source 1..34: mol_type = other RNA
  modified_base 1: mod_base = OTHER; note = Phosphate 2'-O-methyluridine, wherein phosphate may be absent
  modified_base 2: mod_base = OTHER; note = 2'-fluoroguanosine
  modified_base 3: mod_base = OTHER; note = 2'-O-methylcytidine
  modified_base 4: mod_base = OTHER; note = 2'-fluoroadenosine
  modified_base 5: mod_base = OTHER; note = 2'-O-methylcytidine
  modified_base 6: mod_base = OTHER; note = 2'-fluorouridine
  modified_base 7: mod_base = OTHER; note = 2'-O-methylguanosine
  modified_base 8: mod_base = OTHER; note = 2'-fluoroadenosine
  modified_base 9: mod_base = OTHER; note = 2'-O-methylguanosine
  modified_base 10: mod_base = OTHER; note = 2'-fluoroadenosine
  modified_base 11: mod_base = OTHER; note = 2'-O-methyladenosine
  modified_base 12: mod_base = OTHER; note = 2'-fluorouridine
  modified_base 13: mod_base = OTHER; note = 2'-O-methyladenosine
  modified_base 14: mod_base = OTHER; note = 2'-fluorocytidine
  modified_base 15: mod_base = OTHER; note = 2'-O-methyluridine
  modified_base 16: mod_base = OTHER; note = 2'-fluoroguanosine
  modified_base 17: mod_base = OTHER; note = 2'-O-methyluridine
  modified_base 18: mod_base = OTHER; note = 2'-fluorocytidine
  modified_base 19: mod_base = OTHER; note = 2'-O-methylcytidine
  modified_base 20: mod_base = OTHER; note = 2'-fluoroadenosine
  modified_base 21: mod_base = OTHER; note = 2'-O-methyladenosine
  modified_base 22: mod_base = OTHER; note = 2'-fluoroguanosine
  modified_base 23: mod_base = OTHER; note = 2'-O-methyladenosine
  modified_base 24: mod_base = OTHER; note = 2'-fluorouridine
  modified_base 25: mod_base = OTHER; note = 2'-O-methyladenosine
  modified_base 26: mod_base = OTHER; note = 2'-fluorouridine
  modified_base 27: mod_base = OTHER; note = 2'-O-methyluridine
  modified_base 28: mod_base = OTHER; note = 2'-fluorouridine
  modified_base 29: mod_base = OTHER; note = 2'-O-methyladenosine
  modified_base 30: mod_base = OTHER; note = 2'-fluorouridine
  modified_base 31: mod_base = OTHER; note = 2'-O-methyluridine
  modified_base 32: mod_base = OTHER; note = 2'-fluorocytidine
  modified_base 33: mod_base = OTHER; note = 2'-O-methyluridine
  modified_base 34: mod_base = OTHER; note = 2'-fluoroadenosine
tgcactgagaatactgtccaagatatttattcta

SEQ ID NO: 128 - RNA, 34 nt, synthetic construct
  source 1..34: mol_type = other RNA
  modified_base 1: mod_base = OTHER; note = Phosphate 2'-O-methyluridine, wherein phosphate may be absent
  modified_base 2: mod_base = OTHER; note = 2'-fluoroguanosine
  modified_base 3: mod_base = OTHER; note = 2'-O-methylcytidine
  modified_base 4: mod_base = OTHER; note = 2'-fluoroadenosine
  modified_base 5: mod_base = OTHER; note = 2'-O-methylcytidine
  modified_base 6: mod_base = OTHER; note = 2'-fluorouridine
  modified_base 7: mod_base = OTHER; note = 2'-O-methylguanosine
  modified_base 8: mod_base = OTHER; note = 2'-fluoroadenosine
  modified_base 9: mod_base = OTHER; note = 2'-O-methylguanosine
  modified_base 10: mod_base = OTHER; note = 2'-fluoroadenosine
  modified_base 11: mod_base = OTHER; note = 2'-O-methyladenosine
  modified_base 12: mod_base = OTHER; note = 2'-fluorouridine
  modified_base 13: mod_base = OTHER; note = 2'-O-methyladenosine
  modified_base 14: mod_base = OTHER; note = 2'-fluorocytidine
  modified_base 15: mod_base = OTHER; note = 2'-O-methyluridine
  modified_base 16: mod_base = OTHER; note = 2'-fluoroguanosine
  modified_base 17: mod_base = OTHER; note = 2'-O-methyluridine
  modified_base 18: mod_base = OTHER; note = 2'-fluorocytidine
  modified_base 19: mod_base = OTHER; note = 2'-O-methylcytidine
  modified_base 20: mod_base = OTHER; note = 2'-fluoroadenosine
  modified_base 21: mod_base = OTHER; note = 2'-O-methylcytidine
  modified_base 22: mod_base = OTHER; note = 2'-fluorocytidine
  modified_base 23: mod_base = OTHER; note = 2'-O-methyluridine
  modified_base 24: mod_base = OTHER; note = 2'-fluoroguanosine
  modified_base 25: mod_base = OTHER; note = 2'-O-methyluridine
  modified_base 26: mod_base = OTHER; note = 2'-fluorouridine
  modified_base 27: mod_base = OTHER; note = 2'-O-methyluridine
  modified_base 28: mod_base = OTHER; note = 2'-fluorouridine
  modified_base 29: mod_base = OTHER; note = 2'-O-methylguanosine
  modified_base 30: mod_base = OTHER; note = 2'-fluorocytidine
  modified_base 31: mod_base = OTHER; note = 2'-O-methyluridine
  modified_base 32: mod_base = OTHER; note = 2'-fluorouridine
  modified_base 33: mod_base = OTHER; note = 2'-O-methyluridine
  modified_base 34: mod_base = OTHER; note = 2'-fluoroadenosine
tgcactgagaatactgtccacctgttttgcttta

SEQ ID NO: 129 - RNA, 34 nt, synthetic construct
  source 1..34: mol_type = other RNA
  modified_base 1: mod_base = OTHER; note = Phosphate 2'-O-methyluridine, wherein phosphate may be absent
  modified_base 2: mod_base = OTHER; note = 2'-fluorocytidine
  modified_base 3: mod_base = OTHER; note = 2'-O-methyladenosine
  modified_base 4: mod_base = OTHER; note = 2'-fluoroadenosine
  modified_base 5: mod_base = OTHER; note = 2'-O-methylcytidine
  modified_base 6: mod_base = OTHER; note = 2'-fluoroadenosine
  modified_base 7: mod_base = OTHER; note = 2'-O-methyladenosine
  modified_base 8: mod_base = OTHER; note = 2'-fluoroguanosine
  modified_base 9: mod_base = OTHER; note = 2'-O-methylguanosine
  modified_base 10: mod_base = OTHER; note = 2'-fluoroadenosine
  modified_base 11: mod_base = OTHER; note = 2'-O-methylguanosine
  modified_base 12: mod_base = OTHER; note = 2'-fluorouridine
  modified_base 13: mod_base = OTHER; note = 2'-O-methyladenosine
  modified_base 14: mod_base = OTHER; note = 2'-fluorocytidine
  modified_base 15: mod_base = OTHER; note = 2'-O-methylcytidine
  modified_base 16: mod_base = OTHER; note = 2'-fluorocytidine
  modified_base 17: mod_base = OTHER; note = 2'-O-methylguanosine
  modified_base 18: mod_base = OTHER; note = 2'-fluoroguanosine
  modified_base 19: mod_base = OTHER; note = 2'-O-methylguanosine
  modified_base 20: mod_base = OTHER; note = 2'-fluorouridine
  modified_base 21: mod_base = OTHER; note = 2'-O-methyluridine
  modified_base 22: mod_base = OTHER; note = 2'-fluorouridine
  modified_base 23: mod_base = OTHER; note = 2'-O-methylguanosine
  modified_base 24: mod_base = OTHER; note = 2'-fluorouridine
  modified_base 25: mod_base = OTHER; note = 2'-O-methyladenosine
  modified_base 26: mod_base = OTHER; note = 2'-fluoroadenosine
  modified_base 27: mod_base = OTHER; note = 2'-O-methylcytidine
  modified_base 28: mod_base = OTHER; note = 2'-fluorouridine
  modified_base 29: mod_base = OTHER; note = 2'-O-methyluridine
  modified_base 30: mod_base = OTHER; note = 2'-fluoroguanosine
  modified_base 31: mod_base = OTHER; note = 2'-O-methyladenosine
  modified_base 32: mod_base = OTHER; note = 2'-fluoroadenosine
  modified_base 33: mod_base = OTHER; note = 2'-O-methylguanosine
  modified_base 34: mod_base = OTHER; note = 2'-fluoroadenosine
tcaacaaggagtacccgggtttgtaacttgaaga

SEQ ID NO: 130 - RNA, 34 nt, synthetic construct
  source 1..34: mol_type = other RNA
  modified_base 1: mod_base = OTHER; note = Phosphate 2'-O-methyluridine, wherein phosphate may be absent
  modified_base 2: mod_base = OTHER; note = 2'-fluorocytidine
  modified_base 3: mod_base = OTHER; note = 2'-O-methyladenosine
  modified_base 4: mod_base = OTHER; note = 2'-fluoroadenosine
  modified_base 5: mod_base = OTHER; note = 2'-O-methylcytidine
  modified_base 6: mod_base = OTHER; note = 2'-fluoroadenosine
  modified_base 7: mod_base = OTHER; note = 2'-O-methyladenosine
  modified_base 8: mod_base = OTHER; note = 2'-fluoroguanosine
  modified_base 9: mod_base = OTHER; note = 2'-O-methylguanosine
  modified_base 10: mod_base = OTHER; note = 2'-fluoroadenosine
  modified_base 11: mod_base = OTHER; note = 2'-O-methylguanosine
  modified_base 12: mod_base = OTHER; note = 2'-fluorouridine
  modified_base 13: mod_base = OTHER; note = 2'-O-methyladenosine
  modified_base 14: mod_base = OTHER; note = 2'-fluorocytidine
  modified_base 15: mod_base = OTHER; note = 2'-O-methylcytidine
  modified_base 16: mod_base = OTHER; note = 2'-fluorocytidine
  modified_base 17: mod_base = OTHER; note = 2'-O-methylguanosine
  modified_base 18: mod_base = OTHER; note = 2'-fluoroguanosine
  modified_base 19: mod_base = OTHER; note = 2'-O-methylguanosine
  modified_base 20: mod_base = OTHER; note = 2'-fluorocytidine
  modified_base 21: mod_base = OTHER; note = 2'-O-methylcytidine
  modified_base 22: mod_base = OTHER; note = 2'-fluorouridine
  modified_base 23: mod_base = OTHER; note = 2'-O-methylguanosine
  modified_base 24: mod_base = OTHER; note = 2'-fluorouridine
  modified_base 25: mod_base = OTHER; note = 2'-O-methyluridine
  modified_base 26: mod_base = OTHER; note = 2'-fluorouridine
  modified_base 27: mod_base = OTHER; note = 2'-O-methyluridine
  modified_base 28: mod_base = OTHER; note = 2'-fluoroguanosine
  modified_base 29: mod_base = OTHER; note = 2'-O-methylcytidine
  modified_base 30: mod_base = OTHER; note = 2'-fluorouridine
  modified_base 31: mod_base = OTHER; note = 2'-O-methyluridine
  modified_base 32: mod_base = OTHER; note = 2'-fluorouridine
  modified_base 33: mod_base = OTHER; note = 2'-O-methyluridine
  modified_base 34: mod_base = OTHER; note = 2'-fluoroadenosine
tcaacaaggagtacccgggcctgttttgctttta

SEQ ID NO: 131 - RNA, 34 nt, synthetic construct
  source 1..34: mol_type = other RNA
  modified_base 1: mod_base = OTHER; note = Phosphate 2'-O-methyluridine, wherein phosphate may be absent
  modified_base 2: mod_base = OTHER; note = 2'-fluorocytidine
  modified_base 3: mod_base = OTHER; note = 2'-O-methyladenosine
  modified_base 4: mod_base = OTHER; note = 2'-fluoroadenosine
  modified_base 5: mod_base = OTHER; note = 2'-O-methylcytidine
  modified_base 6: mod_base = OTHER; note = 2'-fluoroadenosine
  modified_base 7: mod_base = OTHER; note = 2'-O-methyladenosine
  modified_base 8: mod_base = OTHER; note = 2'-fluoroguanosine
  modified_base 9: mod_base = OTHER; note = 2'-O-methylguanosine
  modified_base 10: mod_base = OTHER; note = 2'-fluoroadenosine
  modified_base 11: mod_base = OTHER; note = 2'-O-methylguanosine
  modified_base 12: mod_base = OTHER; note = 2'-fluorouridine
  modified_base 13: mod_base = OTHER; note = 2'-O-methyladenosine
  modified_base 14: mod_base = OTHER; note = 2'-fluorocytidine
  modified_base 15: mod_base = OTHER; note = 2'-O-methylcytidine
  modified_base 16: mod_base = OTHER; note = 2'-fluorocytidine
  modified_base 17: mod_base = OTHER; note = 2'-O-methylguanosine
  modified_base 18: mod_base = OTHER; note = 2'-fluoroguanosine
  modified_base 19: mod_base = OTHER; note = 2'-O-methylguanosine
  modified_base 20: mod_base = OTHER; note = 2'-fluorouridine
  modified_base 21: mod_base = OTHER; note = 2'-O-methylguanosine
  modified_base 22: mod_base = OTHER; note = 2'-fluorouridine
  modified_base 23: mod_base = OTHER; note = 2'-O-methyluridine
  modified_base 24: mod_base = OTHER; note = 2'-fluorouridine
  modified_base 25: mod_base = OTHER; note = 2'-O-methyluridine
  modified_base 26: mod_base = OTHER; note = 2'-fluoroguanosine
  modified_base 27: mod_base = OTHER; note = 2'-O-methylcytidine
  modified_base 28: mod_base = OTHER; note = 2'-fluorouridine
  modified_base 29: mod_base = OTHER; note = 2'-O-methyluridine
  modified_base 30: mod_base = OTHER; note = 2'-fluorouridine
  modified_base 31: mod_base = OTHER; note = 2'-O-methyluridine
  modified_base 32: mod_base = OTHER; note = 2'-fluoroguanosine
  modified_base 33: mod_base = OTHER; note = 2'-O-methyluridine
  modified_base 34: mod_base = OTHER; note = 2'-fluoroadenosine
tcaacaaggagtacccgggtgttttgcttttgta

SEQ ID NO: 132 - RNA, 34 nt, synthetic construct
  source 1..34: mol_type = other RNA
  modified_base 1: mod_base = OTHER; note = Phosphate 2'-O-methyluridine, wherein phosphate may be absent
  modified_base 2: mod_base = OTHER; note = 2'-fluorocytidine
  modified_base 3: mod_base = OTHER; note = 2'-O-methyladenosine
  modified_base 4: mod_base = OTHER; note = 2'-fluoroadenosine
  modified_base 5: mod_base = OTHER; note = 2'-O-methylcytidine
  modified_base 6: mod_base = OTHER; note = 2'-fluoroadenosine
  modified_base 7: mod_base = OTHER; note = 2'-O-methyladenosine
  modified_base 8: mod_base = OTHER; note = 2'-fluoroguanosine
  modified_base 9: mod_base = OTHER; note = 2'-O-methylguanosine
  modified_base 10: mod_base = OTHER; note = 2'-fluoroadenosine
  modified_base 11: mod_base = OTHER; note = 2'-O-methylguanosine
  modified_base 12: mod_base = OTHER; note = 2'-fluorouridine
  modified_base 13: mod_base = OTHER; note = 2'-O-methyladenosine
  modified_base 14: mod_base = OTHER; note = 2'-fluorocytidine
  modified_base 15: mod_base = OTHER; note = 2'-O-methylcytidine
  modified_base 16: mod_base = OTHER; note = 2'-fluorocytidine
  modified_base 17: mod_base = OTHER; note = 2'-O-methylguanosine
  modified_base 18: mod_base = OTHER; note = 2'-fluoroguanosine
  modified_base 19: mod_base = OTHER; note = 2'-O-methylguanosine
  modified_base 20: mod_base = OTHER; note = 2'-fluorouridine
  modified_base 21: mod_base = OTHER; note = 2'-O-methyladenosine
  modified_base 22: mod_base = OTHER; note = 2'-fluoroguanosine
  modified_base 23: mod_base = OTHER; note = 2'-O-methyladenosine
  modified_base 24: mod_base = OTHER; note = 2'-fluorocytidine
  modified_base 25: mod_base = OTHER; note = 2'-O-methylcytidine
  modified_base 26: mod_base = OTHER; note = 2'-fluorouridine
  modified_base 27: mod_base = OTHER; note = 2'-O-methylguanosine
  modified_base 28: mod_base = OTHER; note = 2'-fluorouridine
  modified_base 29: mod_base = OTHER; note = 2'-O-methyluridine
  modified_base 30: mod_base = OTHER; note = 2'-fluorouridine
  modified_base 31: mod_base = OTHER; note = 2'-O-methyluridine
  modified_base 32: mod_base = OTHER; note = 2'-fluoroguanosine
  modified_base 33: mod_base = OTHER; note = 2'-O-methylcytidine
  modified_base 34: mod_base = OTHER; note = 2'-fluoroadenosine
tcaacaaggagtacccgggtagacctgttttgca

SEQ ID NO: 133 - RNA, 34 nt, synthetic construct
  source 1..34: mol_type = other RNA
  modified_base 1: mod_base = OTHER; note = Phosphate 2'-O-methyluridine, wherein phosphate may be absent
  modified_base 2: mod_base = OTHER; note = 2'-fluorocytidine
  modified_base 3: mod_base = OTHER; note = 2'-O-methyladenosine
  modified_base 4: mod_base = OTHER; note = 2'-fluoroadenosine
  modified_base 5: mod_base = OTHER; note = 2'-O-methylcytidine
  modified_base 6: mod_base = OTHER; note = 2'-fluoroadenosine
  modified_base 7: mod_base = OTHER; note = 2'-O-methyladenosine
  modified_base 8: mod_base = OTHER; note = 2'-fluoroguanosine
  modified_base 9: mod_base = OTHER; note = 2'-O-methylguanosine
  modified_base 10: mod_base = OTHER; note = 2'-fluoroadenosine
  modified_base 11: mod_base = OTHER; note = 2'-O-methylguanosine
  modified_base 12: mod_base = OTHER; note = 2'-fluorouridine
  modified_base 13: mod_base = OTHER; note = 2'-O-methyladenosine
  modified_base 14: mod_base = OTHER; note = 2'-fluorocytidine
  modified_base 15: mod_base = OTHER; note = 2'-O-methylcytidine
  modified_base 16: mod_base = OTHER; note = 2'-fluorocytidine
  modified_base 17: mod_base = OTHER; note = 2'-O-methylguanosine
  modified_base 18: mod_base = OTHER; note = 2'-fluoroguanosine
  modified_base 19: mod_base = OTHER; note = 2'-O-methylguanosine
  modified_base 20: mod_base = OTHER; note = 2'-fluorocytidine
  modified_base 21: mod_base = OTHER; note = 2'-O-methyluridine
  modified_base 22: mod_base = OTHER; note = 2'-fluoroguanosine
  modified_base 23: mod_base = OTHER; note = 2'-O-methyluridine
  modified_base 24: mod_base = OTHER; note = 2'-fluorouridine
  modified_base 25: mod_base = OTHER; note = 2'-O-methyluridine
  modified_base 26: mod_base = OTHER; note = 2'-fluorouridine
  modified_base 27: mod_base = OTHER; note = 2'-O-methylguanosine
  modified_base 28: mod_base = OTHER; note = 2'-fluorocytidine
  modified_base 29: mod_base = OTHER; note = 2'-O-methyluridine
  modified_base 30: mod_base = OTHER; note = 2'-fluorouridine
  modified_base 31: mod_base = OTHER; note = 2'-O-methyluridine
  modified_base 32: mod_base = OTHER; note = 2'-fluorouridine
  modified_base 33: mod_base = OTHER; note = 2'-O-methylguanosine
  modified_base 34: mod_base = OTHER; note = 2'-fluoroadenosine
tcaacaaggagtacccgggctgttttgcttttga

SEQ ID NO: 134 - RNA, 34 nt, synthetic construct
  source 1..34: mol_type = other RNA
  modified_base 1: mod_base = OTHER; note = Phosphate 2'-O-methyluridine, wherein phosphate may be absent
  modified_base 2: mod_base = OTHER; note = 2'-fluorocytidine
  modified_base 3: mod_base = OTHER; note = 2'-O-methyladenosine
  modified_base 4: mod_base = OTHER; note = 2'-fluoroadenosine
  modified_base 5: mod_base = OTHER; note = 2'-O-methylcytidine
  modified_base 6: mod_base = OTHER; note = 2'-fluoroadenosine
  modified_base 7: mod_base = OTHER; note = 2'-O-methyladenosine
  modified_base 8: mod_base = OTHER; note = 2'-fluoroguanosine
  modified_base 9: mod_base = OTHER; note = 2'-O-methylguanosine
  modified_base 10: mod_base = OTHER; note = 2'-fluoroadenosine
  modified_base 11: mod_base = OTHER; note = 2'-O-methylguanosine
  modified_base 12: mod_base = OTHER; note = 2'-fluorouridine
  modified_base 13: mod_base = OTHER; note = 2'-O-methyladenosine
  modified_base 14: mod_base = OTHER; note = 2'-fluorocytidine
  modified_base 15: mod_base = OTHER; note = 2'-O-methylcytidine
  modified_base 16: mod_base = OTHER; note = 2'-fluorocytidine
  modified_base 17: mod_base = OTHER; note = 2'-O-methylguanosine
  modified_base 18: mod_base = OTHER; note = 2'-fluoroguanosine
  modified_base 19: mod_base = OTHER; note = 2'-O-methylguanosine
  modified_base 20: mod_base = OTHER; note = 2'-fluoroadenosine
  modified_base 21: mod_base = OTHER; note = 2'-O-methyladenosine
  modified_base 22: mod_base = OTHER; note = 2'-fluoroguanosine
  modified_base 23: mod_base = OTHER; note = 2'-O-methyladenosine
  modified_base 24: mod_base = OTHER; note = 2'-fluorouridine
  modified_base 25: mod_base = OTHER; note = 2'-O-methyladenosine
  modified_base 26: mod_base = OTHER; note = 2'-fluorouridine
  modified_base 27: mod_base = OTHER; note = 2'-O-methyluridine
  modified_base 28: mod_base = OTHER; note = 2'-fluorouridine
  modified_base 29: mod_base = OTHER; note = 2'-O-methyladenosine
  modified_base 30: mod_base = OTHER; note = 2'-fluorouridine
  modified_base 31: mod_base = OTHER; note = 2'-O-methyluridine
  modified_base 32: mod_base = OTHER; note = 2'-fluorocytidine
  modified_base 33: mod_base = OTHER; note = 2'-O-methyluridine
  modified_base 34: mod_base = OTHER; note = 2'-fluoroadenosine
tcaacaaggagtacccgggaagatatttattcta

SEQ ID NO: 135 - RNA, 34 nt, synthetic construct
  source 1..34: mol_type = other RNA
  modified_base 1: mod_base = OTHER; note = Phosphate 2'-O-methyluridine, wherein phosphate may be absent
  modified_base 2: mod_base = OTHER; note = 2'-fluorocytidine
  modified_base 3: mod_base = OTHER; note = 2'-O-methyladenosine
  modified_base 4: mod_base = OTHER; note = 2'-fluoroadenosine
  modified_base 5: mod_base = OTHER; note = 2'-O-methylcytidine
  modified_base 6: mod_base = OTHER; note = 2'-fluoroadenosine
  modified_base 7: mod_base = OTHER; note = 2'-O-methyladenosine
  modified_base 8: mod_base = OTHER; note = 2'-fluoroguanosine
  modified_base 9: mod_base = OTHER; note = 2'-O-methylguanosine
  modified_base 10: mod_base = OTHER; note = 2'-fluoroadenosine
  modified_base 11: mod_base = OTHER; note = 2'-O-methylguanosine
  modified_base 12: mod_base = OTHER; note = 2'-fluorouridine
  modified_base 13: mod_base = OTHER; note = 2'-O-methyladenosine
  modified_base 14: mod_base = OTHER; note = 2'-fluorocytidine
  modified_base 15: mod_base = OTHER; note = 2'-O-methylcytidine
  modified_base 16: mod_base = OTHER; note = 2'-fluorocytidine
  modified_base 17: mod_base = OTHER; note = 2'-O-methylguanosine
  modified_base 18: mod_base = OTHER; note = 2'-fluoroguanosine
  modified_base 19: mod_base = OTHER; note = 2'-O-methylguanosine
  modified_base 20: mod_base = OTHER; note = 2'-fluoroadenosine
  modified_base 21: mod_base = OTHER; note = 2'-O-methylcytidine
  modified_base 22: mod_base = OTHER; note = 2'-fluorocytidine
  modified_base 23: mod_base = OTHER; note = 2'-O-methyluridine
  modified_base 24: mod_base = OTHER; note = 2'-fluoroguanosine
  modified_base 25: mod_base = OTHER; note = 2'-O-methyluridine
  modified_base 26: mod_base = OTHER; note = 2'-fluorouridine
  modified_base 27: mod_base = OTHER; note = 2'-O-methyluridine
  modified_base 28: mod_base = OTHER; note = 2'-fluorouridine
  modified_base 29: mod_base = OTHER; note = 2'-O-methylguanosine
  modified_base 30: mod_base = OTHER; note = 2'-fluorocytidine
  modified_base 31: mod_base = OTHER; note = 2'-O-methyluridine
  modified_base 32: mod_base = OTHER; note = 2'-fluorouridine
  modified_base 33: mod_base = OTHER; note = 2'-O-methyluridine
  modified_base 34: mod_base = OTHER; note = 2'-fluoroadenosine
tcaacaaggagtacccgggacctgttttgcttta

SEQ ID NO: 136 - RNA, 34 nt, synthetic construct
  source 1..34: mol_type = other RNA
  modified_base 1: mod_base = OTHER; note = Phosphate 2'-O-methyluridine, wherein phosphate may be absent
  modified_base 2: mod_base = OTHER; note = 2'-fluorocytidine
  modified_base 3: mod_base = OTHER; note = 2'-O-methyluridine
  modified_base 4: mod_base = OTHER; note = 2'-fluorouridine
  modified_base 5: mod_base = OTHER; note = 2'-O-methylguanosine
  modified_base 6: mod_base = OTHER; note = 2'-fluorouridine
  modified_base 7: mod_base = OTHER; note = 2'-O-methylcytidine
  modified_base 8: mod_base = OTHER; note = 2'-fluorocytidine
  modified_base 9: mod_base = OTHER; note = 2'-O-methyladenosine
  modified_base 10: mod_base = OTHER; note = 2'-fluoroguanosine
  modified_base 11: mod_base = OTHER; note = 2'-O-methylcytidine
  modified_base 12: mod_base = OTHER; note = 2'-fluorouridine
  modified_base 13: mod_base = OTHER; note = 2'-O-methyluridine
  modified_base 14: mod_base = OTHER; note = 2'-fluorouridine
  modified_base 15: mod_base = OTHER; note = 2'-O-methyladenosine
  modified_base 16: mod_base = OTHER; note = 2'-fluorouridine
  modified_base 17: mod_base = OTHER; note = 2'-O-methyluridine
  modified_base 18: mod_base = OTHER; note = 2'-fluoroguanosine
  modified_base 19: mod_base = OTHER; note = 2'-O-methylguanosine
  modified_base 20: mod_base = OTHER; note = 2'-fluorouridine
  modified_base 21: mod_base = OTHER; note = 2'-O-methyluridine
  modified_base 22: mod_base = OTHER; note = 2'-fluorouridine
  modified_base 23: mod_base = OTHER; note = 2'-O-methylguanosine
  modified_base 24: mod_base = OTHER; note = 2'-fluorouridine
  modified_base 25: mod_base = OTHER; note = 2'-O-methyladenosine
  modified_base 26: mod_base = OTHER; note = 2'-fluoroadenosine
  modified_base 27: mod_base = OTHER; note = 2'-O-methylcytidine
  modified_base 28: mod_base = OTHER; note = 2'-fluorouridine
  modified_base 29: mod_base = OTHER; note = 2'-O-methyluridine
  modified_base 30: mod_base = OTHER; note = 2'-fluoroguanosine
  modified_base 31: mod_base = OTHER; note = 2'-O-methyladenosine
  modified_base 32: mod_base = OTHER; note = 2'-fluoroadenosine
  modified_base 33: mod_base = OTHER; note = 2'-O-methylguanosine
  modified_base 34: mod_base = OTHER; note = 2'-fluoroadenosine
tcttgtccagctttattggtttgtaacttgaaga

SEQ ID NO: 137 - RNA, 34 nt, synthetic construct
  source 1..34: mol_type = other RNA
  modified_base 1: mod_base = OTHER; note = Phosphate 2'-O-methyluridine, wherein phosphate may be absent
  modified_base 2: mod_base = OTHER; note = 2'-fluorocytidine
  modified_base 3: mod_base = OTHER; note = 2'-O-methyluridine
  modified_base 4: mod_base = OTHER; note = 2'-fluorouridine
  modified_base 5: mod_base = OTHER; note = 2'-O-methylguanosine
  modified_base 6: mod_base = OTHER; note = 2'-fluorouridine
  modified_base 7: mod_base = OTHER; note = 2'-O-methylcytidine
  modified_base 8: mod_base = OTHER; note = 2'-fluorocytidine
  modified_base 9: mod_base = OTHER; note = 2'-O-methyladenosine
  modified_base 10: mod_base = OTHER; note = 2'-fluoroguanosine
  modified_base 11: mod_base = OTHER; note = 2'-O-methylcytidine
  modified_base 12: mod_base = OTHER; note = 2'-fluorouridine
  modified_base 13: mod_base = OTHER; note = 2'-O-methyluridine
  modified_base 14: mod_base = OTHER; note = 2'-fluorouridine
  modified_base 15: mod_base = OTHER; note = 2'-O-methyladenosine
  modified_base 16: mod_base = OTHER; note = 2'-fluorouridine
  modified_base 17: mod_base = OTHER; note = 2'-O-methyluridine
  modified_base 18: mod_base = OTHER; note = 2'-fluoroguanosine
  modified_base 19: mod_base = OTHER; note = 2'-O-methylguanosine
  modified_base 20: mod_base = OTHER; note = 2'-fluorocytidine
  modified_base 21: mod_base = OTHER; note = 2'-O-methylcytidine
  modified_base 22: mod_base = OTHER; note = 2'-fluorouridine
  modified_base 23: mod_base = OTHER; note = 2'-O-methylguanosine
  modified_base 24: mod_base = OTHER; note = 2'-fluorouridine
  modified_base 25: mod_base = OTHER; note = 2'-O-methyluridine
  modified_base 26: mod_base = OTHER; note = 2'-fluorouridine
  modified_base 27: mod_base = OTHER; note = 2'-O-methyluridine
  modified_base 28: mod_base = OTHER; note = 2'-fluoroguanosine
  modified_base 29: mod_base = OTHER; note = 2'-O-methylcytidine
  modified_base 30: mod_base = OTHER; note = 2'-fluorouridine
  modified_base 31: mod_base = OTHER; note = 2'-O-methyluridine
  modified_base 32: mod_base = OTHER; note = 2'-fluorouridine
  modified_base 33: mod_base = OTHER; note = 2'-O-methyluridine
  modified_base 34: mod_base = OTHER; note = 2'-fluoroadenosine
tcttgtccagctttattggcctgttttgctttta

SEQ ID NO: 138 - RNA, 34 nt, synthetic construct
  source 1..34: mol_type = other RNA
  modified_base 1: mod_base = OTHER; note = Phosphate 2'-O-methyluridine, wherein phosphate may be absent
  modified_base 2: mod_base = OTHER; note = 2'-fluorocytidine
  modified_base 3: mod_base = OTHER; note = 2'-O-methyluridine
  modified_base 4: mod_base = OTHER; note = 2'-fluorouridine
  modified_base 5: mod_base = OTHER; note = 2'-O-methylguanosine
  modified_base 6: mod_base = OTHER; note = 2'-fluorouridine
  modified_base 7: mod_base = OTHER; note = 2'-O-methylcytidine
  modified_base 8: mod_base = OTHER; note = 2'-fluorocytidine
  modified_base 9: mod_base = OTHER; note = 2'-O-methyladenosine
  modified_base 10: mod_base = OTHER; note = 2'-fluoroguanosine
  modified_base 11: mod_base = OTHER; note = 2'-O-methylcytidine
  modified_base 12: mod_base = OTHER; note = 2'-fluorouridine
  modified_base 13: mod_base = OTHER; note = 2'-O-methyluridine
  modified_base 14: mod_base = OTHER; note = 2'-fluorouridine
  modified_base 15: mod_base = OTHER; note = 2'-O-methyladenosine
  modified_base 16: mod_base = OTHER; note = 2'-fluorouridine
  modified_base 17: mod_base = OTHER; note = 2'-O-methyluridine
  modified_base 18: mod_base = OTHER; note = 2'-fluoroguanosine
  modified_base 19: mod_base = OTHER; note = 2'-O-methylguanosine
  modified_base 20: mod_base = OTHER; note = 2'-fluorouridine
  modified_base 21: mod_base = OTHER; note = 2'-O-methylguanosine
  modified_base 22: mod_base = OTHER; note = 2'-fluorouridine
  modified_base 23: mod_base = OTHER; note = 2'-O-methyluridine
  modified_base 24: mod_base = OTHER; note = 2'-fluorouridine
  modified_base 25: mod_base = OTHER; note = 2'-O-methyluridine
  modified_base 26: mod_base = OTHER; note = 2'-fluoroguanosine
  modified_base 27: mod_base = OTHER; note = 2'-O-methylcytidine
  modified_base 28: mod_base = OTHER; note = 2'-fluorouridine
  modified_base 29: mod_base = OTHER; note = 2'-O-methyluridine
  modified_base 30: mod_base = OTHER; note = 2'-fluorouridine
  modified_base 31: mod_base = OTHER; note = 2'-O-methyluridine
  modified_base 32: mod_base = OTHER; note = 2'-fluoroguanosine
  modified_base 33: mod_base = OTHER; note = 2'-O-methyluridine
  modified_base 34: mod_base = OTHER; note = 2'-fluoroadenosine
tcttgtccagctttattggtgttttgcttttgta

SEQ ID NO: 139 - RNA, 34 nt, synthetic construct
  source 1..34: mol_type = other RNA
  modified_base 1: mod_base = OTHER; note = Phosphate 2'-O-methyluridine, wherein phosphate may be absent
  modified_base 2: mod_base = OTHER; note = 2'-fluorocytidine
  modified_base 3: mod_base = OTHER; note = 2'-O-methyluridine
  modified_base 4: mod_base = OTHER; note = 2'-fluorouridine
  modified_base 5: mod_base = OTHER; note = 2'-O-methylguanosine
  modified_base 6: mod_base = OTHER; note = 2'-fluorouridine
  modified_base 7: mod_base = OTHER; note = 2'-O-methylcytidine
  modified_base 8: mod_base = OTHER; note = 2'-fluorocytidine
  modified_base 9: mod_base = OTHER; note = 2'-O-methyladenosine
  modified_base 10: mod_base = OTHER; note = 2'-fluoroguanosine
  modified_base 11: mod_base = OTHER; note = 2'-O-methylcytidine
  modified_base 12: mod_base = OTHER; note = 2'-fluorouridine
  modified_base 13: mod_base = OTHER; note = 2'-O-methyluridine
  modified_base 14: mod_base = OTHER; note = 2'-fluorouridine
  modified_base 15: mod_base = OTHER; note = 2'-O-methyladenosine
  modified_base 16: mod_base = OTHER; note = 2'-fluorouridine
  modified_base 17: mod_base = OTHER; note = 2'-O-methyluridine
  modified_base 18: mod_base = OTHER; note = 2'-fluoroguanosine
  modified_base 19: mod_base = OTHER; note = 2'-O-methylguanosine
  modified_base 20: mod_base = OTHER; note = 2'-fluorouridine
  modified_base 21: mod_base = OTHER; note = 2'-O-methyladenosine
  modified_base 22: mod_base = OTHER; note = 2'-fluoroguanosine
  modified_base 23: mod_base = OTHER; note = 2'-O-methyladenosine
  modified_base 24: mod_base = OTHER; note = 2'-fluorocytidine
  modified_base 25: mod_base = OTHER; note = 2'-O-methylcytidine
  modified_base 26: mod_base = OTHER; note = 2'-fluorouridine
  modified_base 27: mod_base = OTHER; note = 2'-O-methylguanosine
  modified_base 28: mod_base = OTHER; note = 2'-fluorouridine
  modified_base 29: mod_base = OTHER; note = 2'-O-methyluridine
  modified_base 30: mod_base = OTHER; note = 2'-fluorouridine
  modified_base 31: mod_base = OTHER; note = 2'-O-methyluridine
  modified_base 32: mod_base = OTHER; note = 2'-fluoroguanosine
  modified_base 33: mod_base = OTHER; note = 2'-O-methylcytidine
  modified_base 34: mod_base = OTHER; note = 2'-fluoroadenosine
tcttgtccagctttattggtagacctgttttgca

SEQ ID NO: 140 - RNA, 34 nt, synthetic construct
  source 1..34: mol_type = other RNA
  modified_base 1: mod_base = OTHER; note = Phosphate 2'-O-methyluridine, wherein phosphate may be absent
  modified_base 2: mod_base = OTHER; note = 2'-fluorocytidine
  modified_base 3: mod_base = OTHER; note = 2'-O-methyluridine
  modified_base 4: mod_base = OTHER; note = 2'-fluorouridine
  modified_base 5: mod_base = OTHER; note = 2'-O-methylguanosine
  modified_base 6: mod_base = OTHER; note = 2'-fluorouridine
  modified_base 7: mod_base = OTHER; note = 2'-O-methylcytidine
  modified_base 8: mod_base = OTHER; note = 2'-fluorocytidine
  modified_base 9: mod_base = OTHER; note = 2'-O-methyladenosine
  modified_base 10: mod_base = OTHER; note = 2'-fluoroguanosine
  modified_base 11: mod_base = OTHER; note = 2'-O-methylcytidine
  modified_base 12: mod_base = OTHER; note = 2'-fluorouridine
  modified_base 13: mod_base = OTHER; note = 2'-O-methyluridine
  modified_base 14: mod_base = OTHER; note = 2'-fluorouridine
  modified_base 15: mod_base = OTHER; note = 2'-O-methyladenosine
  modified_base 16: mod_base = OTHER; note = 2'-fluorouridine
  modified_base 17: mod_base = OTHER; note = 2'-O-methyluridine
  modified_base 18: mod_base = OTHER; note = 2'-fluoroguanosine
  modified_base 19: mod_base = OTHER; note = 2'-O-methylguanosine
  modified_base 20: mod_base = OTHER; note = 2'-fluorocytidine
  modified_base 21: mod_base = OTHER; note = 2'-O-methyluridine
  modified_base 22: mod_base = OTHER; note = 2'-fluoroguanosine
  modified_base 23: mod_base = OTHER; note = 2'-O-methyluridine
  modified_base 24: mod_base = OTHER; note = 2'-fluorouridine
  modified_base 25: mod_base = OTHER; note = 2'-O-methyluridine
  modified_base 26: mod_base = OTHER; note = 2'-fluorouridine
  modified_base 27: mod_base = OTHER; note = 2'-O-methylguanosine
  modified_base 28: mod_base = OTHER; note = 2'-fluorocytidine
  modified_base 29: mod_base = OTHER; note = 2'-O-methyluridine
  modified_base 30: mod_base = OTHER; note = 2'-fluorouridine
  modified_base 31: mod_base = OTHER; note = 2'-O-methyluridine
  modified_base 32: mod_base = OTHER; note = 2'-fluorouridine
  modified_base 33: mod_base = OTHER; note = 2'-O-methylguanosine
  modified_base 34: mod_base = OTHER; note = 2'-fluoroadenosine
tcttgtccagctttattggctgttttgcttttga

SEQ ID NO: 141 - RNA, 34 nt, synthetic construct
  source 1..34: mol_type = other RNA
  modified_base 1: mod_base = OTHER; note = Phosphate 2'-O-methyluridine, wherein phosphate may be absent
  modified_base 2: mod_base = OTHER; note = 2'-fluorocytidine
  modified_base 3: mod_base = OTHER; note = 2'-O-methyluridine
  modified_base 4: mod_base = OTHER; note = 2'-fluorouridine
  modified_base 5: mod_base = OTHER; note = 2'-O-methylguanosine
  modified_base 6: mod_base = OTHER; note = 2'-fluorouridine
  modified_base 7: mod_base = OTHER; note = 2'-O-methylcytidine
  modified_base 8: mod_base = OTHER; note = 2'-fluorocytidine
  modified_base 9: mod_base = OTHER; note = 2'-O-methyladenosine
  modified_base 10: mod_base = OTHER; note = 2'-fluoroguanosine
  modified_base 11: mod_base = OTHER; note = 2'-O-methylcytidine
  modified_base 12: mod_base = OTHER; note = 2'-fluorouridine
  modified_base 13: mod_base = OTHER; note = 2'-O-methyluridine
  modified_base 14: mod_base = OTHER; note = 2'-fluorouridine
  modified_base 15: mod_base = OTHER; note = 2'-O-methyladenosine
  modified_base 16: mod_base = OTHER; note = 2'-fluorouridine
  modified_base 17: mod_base = OTHER; note = 2'-O-methyluridine
  modified_base 18: mod_base = OTHER; note = 2'-fluoroguanosine
  modified_base 19: mod_base = OTHER; note = 2'-O-methylguanosine
  modified_base 20: mod_base = OTHER; note = 2'-fluoroadenosine
  modified_base 21: mod_base = OTHER; note = 2'-O-methyladenosine
  modified_base 22: mod_base = OTHER; note = 2'-fluoroguanosine
  modified_base 23: mod_base = OTHER; note = 2'-O-methyladenosine
  modified_base 24: mod_base = OTHER; note = 2'-fluorouridine
  modified_base 25: mod_base = OTHER; note = 2'-O-methyladenosine
  modified_base 26: mod_base = OTHER; note = 2'-fluorouridine
  modified_base 27: mod_base = OTHER; note = 2'-O-methyluridine
  modified_base 28: mod_base = OTHER; note = 2'-fluorouridine
  modified_base 29: mod_base = OTHER; note = 2'-O-methyladenosine
  modified_base 30: mod_base = OTHER; note = 2'-fluorouridine
  modified_base 31: mod_base = OTHER; note = 2'-O-methyluridine
  modified_base 32: mod_base = OTHER; note = 2'-fluorocytidine
  modified_base 33: mod_base = OTHER; note = 2'-O-methyluridine
  modified_base 34: mod_base = OTHER; note = 2'-fluoroadenosine
tcttgtccagctttattggaagatatttattcta

SEQ ID NO: 142 - RNA, 34 nt, synthetic construct
  source 1..34: mol_type = other RNA
  modified_base 1: mod_base = OTHER; note = Phosphate 2'-O-methyluridine, wherein phosphate may be absent
  modified_base 2: mod_base = OTHER; note = 2'-fluorocytidine
  modified_base 3: mod_base = OTHER; note = 2'-O-methyluridine
  modified_base 4: mod_base = OTHER; note = 2'-fluorouridine
  modified_base 5: mod_base = OTHER; note = 2'-O-methylguanosine
  modified_base 6: mod_base = OTHER; note = 2'-fluorouridine
  modified_base 7: mod_base = OTHER; note = 2'-O-methylcytidine
  modified_base 8: mod_base = OTHER; note = 2'-fluorocytidine
  modified_base 9: mod_base = OTHER; note = 2'-O-methyladenosine
  modified_base 10: mod_base = OTHER; note = 2'-fluoroguanosine
  modified_base 11: mod_base = OTHER; note = 2'-O-methylcytidine
  modified_base 12: mod_base = OTHER; note = 2'-fluorouridine
  modified_base 13: mod_base = OTHER; note = 2'-O-methyluridine
  modified_base 14: mod_base = OTHER; note = 2'-fluorouridine
  modified_base 15: mod_base = OTHER; note = 2'-O-methyladenosine
  modified_base 16: mod_base = OTHER; note = 2'-fluorouridine
  modified_base 17: mod_base = OTHER; note = 2'-O-methyluridine
  modified_base 18: mod_base = OTHER; note = 2'-fluoroguanosine
  modified_base 19: mod_base = OTHER; note = 2'-O-methylguanosine
  modified_base 20: mod_base = OTHER; note = 2'-fluoroadenosine
  modified_base 21: mod_base = OTHER; note = 2'-O-methylcytidine
  modified_base 22: mod_base = OTHER; note = 2'-fluorocytidine
  modified_base 23: mod_base = OTHER; note = 2'-O-methyluridine
  modified_base 24: mod_base = OTHER; note = 2'-fluoroguanosine
  modified_base 25: mod_base = OTHER; note = 2'-O-methyluridine
  modified_base 26: mod_base = OTHER; note = 2'-fluorouridine
  modified_base 27: mod_base = OTHER; note = 2'-O-methyluridine
  modified_base 28: mod_base = OTHER; note = 2'-fluorouridine
  modified_base 29: mod_base = OTHER; note = 2'-O-methylguanosine
  modified_base 30: mod_base = OTHER; note = 2'-fluorocytidine
  modified_base 31: mod_base = OTHER; note = 2'-O-methyluridine
  modified_base 32: mod_base = OTHER; note = 2'-fluorouridine
  modified_base 33: mod_base = OTHER; note = 2'-O-methyluridine
  modified_base 34: mod_base = OTHER; note = 2'-fluoroadenosine
tcttgtccagctttattggacctgttttgcttta

SEQ ID NO: 143 - RNA, 34 nt, synthetic construct
  source 1..34: mol_type = other RNA
  modified_base 1: mod_base = OTHER; note = Phosphate 2'-O-methyluridine, wherein phosphate may be absent
  modified_base 2: mod_base = OTHER; note = 2'-fluorouridine
  modified_base 3: mod_base = OTHER; note = 2'-O-methylcytidine
  modified_base 4: mod_base = OTHER; note = 2'-fluorocytidine
  modified_base 5: mod_base = OTHER; note = 2'-O-methyladenosine
  modified_base 6: mod_base = OTHER; note = 2'-fluoroguanosine
  modified_base 7: mod_base = OTHER; note = 2'-O-methylcytidine
  modified_base 8: mod_base = OTHER; note = 2'-fluorouridine
  modified_base 9: mod_base = OTHER; note = 2'-O-methyluridine
  modified_base 10: mod_base = OTHER; note = 2'-fluorouridine
  modified_base 11: mod_base = OTHER; note = 2'-O-methyladenosine
  modified_base 12: mod_base = OTHER; note = 2'-fluorouridine
  modified_base 13: mod_base = OTHER; note = 2'-O-methyluridine
  modified_base 14: mod_base = OTHER; note = 2'-fluoroguanosine
  modified_base 15: mod_base = OTHER; note = 2'-O-methylguanosine
  modified_base 16: mod_base = OTHER; note = 2'-fluoroguanosine
  modified_base 17: mod_base = OTHER; note = 2'-O-methyladenosine
  modified_base 18: mod_base = OTHER; note = 2'-fluoroguanosine
  modified_base 19: mod_base = OTHER; note = 2'-O-methylguanosine
  modified_base 20: mod_base = OTHER; note = 2'-fluorouridine
  modified_base 21: mod_base = OTHER; note = 2'-O-methyluridine
  modified_base 22: mod_base = OTHER; note = 2'-fluorouridine
  modified_base 23: mod_base = OTHER; note = 2'-O-methylguanosine
  modified_base 24: mod_base = OTHER; note = 2'-fluorouridine
  modified_base 25: mod_base = OTHER; note = 2'-O-methyladenosine
  modified_base 26: mod_base = OTHER; note = 2'-fluoroadenosine
  modified_base 27: mod_base = OTHER; note = 2'-O-methylcytidine
  modified_base 28: mod_base = OTHER; note = 2'-fluorouridine
  modified_base 29: mod_base = OTHER; note = 2'-O-methyluridine
  modified_base 30: mod_base = OTHER; note = 2'-fluoroguanosine
  modified_base 31: mod_base = OTHER; note = 2'-O-methyladenosine
  modified_base 32: mod_base = OTHER; note = 2'-fluoroadenosine
  modified_base 33: mod_base = OTHER; note = 2'-O-methylguanosine
  modified_base 34: mod_base = OTHER; note = 2'-fluoroadenosine
ttccagctttattgggaggtttgtaacttgaaga

SEQ ID NO: 144 - RNA, 34 nt, synthetic construct
  source 1..34: mol_type = other RNA
  modified_base 1: mod_base = OTHER; note = Phosphate 2'-O-methyluridine, wherein phosphate may be absent
  modified_base 2: mod_base = OTHER; note = 2'-fluorouridine
  modified_base 3: mod_base = OTHER; note = 2'-O-methylcytidine
  modified_base 4: mod_base = OTHER; note = 2'-fluorocytidine
  modified_base 5: mod_base = OTHER; note = 2'-O-methyladenosine
  modified_base 6: mod_base = OTHER; note = 2'-fluoroguanosine
  modified_base 7: mod_base = OTHER; note = 2'-O-methylcytidine
  modified_base 8: mod_base = OTHER; note = 2'-fluorouridine
  modified_base 9: mod_base = OTHER; note = 2'-O-methyluridine
  modified_base 10: mod_base = OTHER; note = 2'-fluorouridine
  modified_base 11: mod_base = OTHER; note = 2'-O-methyladenosine
  modified_base 12: mod_base = OTHER; note = 2'-fluorouridine
  modified_base 13: mod_base = OTHER; note = 2'-O-methyluridine
  modified_base 14: mod_base = OTHER; note = 2'-fluoroguanosine
  modified_base 15: mod_base = OTHER; note = 2'-O-methylguanosine
  modified_base 16: mod_base = OTHER; note = 2'-fluoroguanosine
  modified_base 17: mod_base = OTHER; note = 2'-O-methyladenosine
  modified_base 18: mod_base = OTHER; note = 2'-fluoroguanosine
  modified_base 19: mod_base = OTHER; note = 2'-O-methylguanosine
  modified_base 20: mod_base = OTHER; note = 2'-fluorocytidine
  modified_base 21: mod_base = OTHER; note = 2'-O-methylcytidine
  modified_base 22: mod_base = OTHER; note = 2'-fluorouridine
  modified_base 23: mod_base = OTHER; note = 2'-O-methylguanosine
  modified_base 24: mod_base = OTHER; note = 2'-fluorouridine
  modified_base 25: mod_base = OTHER; note = 2'-O-methyluridine
  modified_base 26: mod_base = OTHER; note = 2'-fluorouridine
  modified_base 27: mod_base = OTHER; note = 2'-O-methyluridine
  modified_base 28: mod_base = OTHER; note = 2'-fluoroguanosine
  modified_base 29: mod_base = OTHER; note = 2'-O-methylcytidine
  modified_base 30: mod_base = OTHER; note = 2'-fluorouridine
  modified_base 31: mod_base = OTHER; note = 2'-O-methyluridine
  modified_base 32: mod_base = OTHER; note = 2'-fluorouridine
  modified_base 33: mod_base = OTHER; note = 2'-O-methyluridine
  modified_base 34: mod_base = OTHER; note = 2'-fluoroadenosine
ttccagctttattgggaggcctgttttgctttta

SEQ ID NO: 145 - RNA, 34 nt, synthetic construct
  source 1..34: mol_type = other RNA
  modified_base 1: mod_base = OTHER; note = Phosphate 2'-O-methyluridine, wherein phosphate may be absent
  modified_base 2: mod_base = OTHER; note = 2'-fluorouridine
  modified_base 3: mod_base = OTHER; note = 2'-O-methylcytidine
  modified_base 4: mod_base = OTHER; note = 2'-fluorocytidine
  modified_base 5: mod_base = OTHER; note = 2'-O-methyladenosine
  modified_base 6: mod_base = OTHER; note = 2'-fluoroguanosine
  modified_base 7: mod_base = OTHER; note = 2'-O-methylcytidine
  modified_base 8: mod_base = OTHER; note = 2'-fluorouridine
  modified_base 9: mod_base = OTHER; note = 2'-O-methyluridine
  modified_base 10: mod_base = OTHER; note = 2'-fluorouridine
  modified_base 11: mod_base = OTHER; note = 2'-O-methyladenosine
  modified_base 12: mod_base = OTHER; note = 2'-fluorouridine
  modified_base 13: mod_base = OTHER; note = 2'-O-methyluridine
  modified_base 14: mod_base = OTHER; note = 2'-fluoroguanosine
  modified_base 15: mod_base = OTHER; note = 2'-O-methylguanosine
  modified_base 16: mod_base = OTHER; note = 2'-fluoroguanosine
  modified_base 17: mod_base = OTHER; note = 2'-O-methyladenosine
  modified_base 18: mod_base = OTHER; note = 2'-fluoroguanosine
  modified_base 19: mod_base = OTHER; note = 2'-O-methylguanosine
  modified_base 20: mod_base = OTHER; note = 2'-fluorouridine
  modified_base 21: mod_base = OTHER; note = 2'-O-methylguanosine
  modified_base 22: mod_base = OTHER; note = 2'-fluorouridine
  modified_base 23: mod_base = OTHER; note = 2'-O-methyluridine
  modified_base 24: mod_base = OTHER; note = 2'-fluorouridine
  modified_base 25: mod_base = OTHER; note = 2'-O-methyluridine
  modified_base 26: mod_base = OTHER; note = 2'-fluoroguanosine
  modified_base 27: mod_base = OTHER; note = 2'-O-methylcytidine
  modified_base 28: mod_base = OTHER; note = 2'-fluorouridine
  modified_base 29: mod_base = OTHER; note = 2'-O-methyluridine
  modified_base 30: mod_base = OTHER; note = 2'-fluorouridine
  modified_base 31: mod_base = OTHER; note = 2'-O-methyluridine
  modified_base 32: mod_base = OTHER; note = 2'-fluoroguanosine
  modified_base 33: mod_base = OTHER; note = 2'-O-methyluridine
  modified_base 34: mod_base = OTHER; note = 2'-fluoroadenosine
ttccagctttattgggaggtgttttgcttttgta

SEQ ID NO: 146 - RNA, 34 nt, synthetic construct
  source 1..34: mol_type = other RNA
  modified_base 1: mod_base = OTHER; note = Phosphate 2'-O-methyluridine, wherein phosphate may be absent
  modified_base 2: mod_base = OTHER; note = 2'-fluorouridine
  modified_base 3: mod_base = OTHER; note = 2'-O-methylcytidine
  modified_base 4: mod_base = OTHER; note = 2'-fluorocytidine
  modified_base 5: mod_base = OTHER; note = 2'-O-methyladenosine
  modified_base 6: mod_base = OTHER; note = 2'-fluoroguanosine
  modified_base 7: mod_base = OTHER; note = 2'-O-methylcytidine
  modified_base 8: mod_base = OTHER; note = 2'-fluorouridine
  modified_base 9: mod_base = OTHER; note = 2'-O-methyluridine
  modified_base 10: mod_base = OTHER; note = 2'-fluorouridine
  modified_base 11: mod_base = OTHER; note = 2'-O-methyladenosine
  modified_base 12: mod_base = OTHER; note = 2'-fluorouridine
  modified_base 13: mod_base = OTHER; note = 2'-O-methyluridine
  modified_base 14: mod_base = OTHER; note = 2'-fluoroguanosine
  modified_base 15: mod_base = OTHER; note = 2'-O-methylguanosine
  modified_base 16: mod_base = OTHER; note = 2'-fluoroguanosine
  modified_base 17: mod_base = OTHER; note = 2'-O-methyladenosine
  modified_base 18: mod_base = OTHER; note = 2'-fluoroguanosine
  modified_base 19: mod_base = OTHER; note = 2'-O-methylguanosine
  modified_base 20: mod_base = OTHER; note = 2'-fluorouridine
  modified_base 21: mod_base = OTHER; note = 2'-O-methyladenosine
  modified_base 22: mod_base = OTHER; note = 2'-fluoroguanosine
  modified_base 23: mod_base = OTHER; note = 2'-O-methyladenosine
  modified_base 24: mod_base = OTHER; note = 2'-fluorocytidine
  modified_base 25: mod_base = OTHER; note = 2'-O-methylcytidine
  modified_base 26: mod_base = OTHER; note = 2'-fluorouridine
  modified_base 27: mod_base = OTHER; note = 2'-O-methylguanosine
  modified_base 28: mod_base = OTHER; note = 2'-fluorouridine
  modified_base 29: mod_base = OTHER; note = 2'-O-methyluridine
  modified_base 30: mod_base = OTHER; note = 2'-fluorouridine
  modified_base 31: mod_base = OTHER; note = 2'-O-methyluridine
  modified_base 32: mod_base = OTHER; note = 2'-fluoroguanosine
  modified_base 33: mod_base = OTHER; note = 2'-O-methylcytidine
  modified_base 34: mod_base = OTHER; note = 2'-fluoroadenosine
ttccagctttattgggaggtagacctgttttgca

SEQ ID NO: 147 - RNA, 34 nt, synthetic construct
  source 1..34: mol_type = other RNA
  modified_base 1: mod_base = OTHER; note = Phosphate 2'-O-methyluridine, wherein phosphate may be absent
  modified_base 2: mod_base = OTHER; note = 2'-fluorouridine
  modified_base 3: mod_base = OTHER; note = 2'-O-methylcytidine
  modified_base 4: mod_base = OTHER; note = 2'-fluorocytidine
  modified_base 5: mod_base = OTHER; note = 2'-O-methyladenosine
  modified_base 6: mod_base = OTHER; note = 2'-fluoroguanosine
  modified_base 7: mod_base = OTHER; note = 2'-O-methylcytidine
  modified_base 8: mod_base = OTHER; note = 2'-fluorouridine
  modified_base 9: mod_base = OTHER; note = 2'-O-methyluridine
  modified_base 10: mod_base = OTHER; note = 2'-fluorouridine
  modified_base 11: mod_base = OTHER; note = 2'-O-methyladenosine
  modified_base 12: mod_base = OTHER; note = 2'-fluorouridine
  modified_base 13: mod_base = OTHER; note = 2'-O-methyluridine
  modified_base 14: mod_base = OTHER; note = 2'-fluoroguanosine
  modified_base 15: mod_base = OTHER; note = 2'-O-methylguanosine
  modified_base 16: mod_base = OTHER; note = 2'-fluoroguanosine
  modified_base 17: mod_base = OTHER; note = 2'-O-methyladenosine
  modified_base 18: mod_base = OTHER; note = 2'-fluoroguanosine
  modified_base 19: mod_base = OTHER; note = 2'-O-methylguanosine
  modified_base 20: mod_base = OTHER; note = 2'-fluorocytidine
  modified_base 21: mod_base = OTHER; note = 2'-O-methyluridine
  modified_base 22: mod_base = OTHER; note = 2'-fluoroguanosine
  modified_base 23: mod_base = OTHER; note = 2'-O-methyluridine
  modified_base 24: mod_base = OTHER; note = 2'-fluorouridine
  modified_base 25: mod_base = OTHER; note = 2'-O-methyluridine
  modified_base 26: mod_base = OTHER; note = 2'-fluorouridine
  modified_base 27: mod_base = OTHER; note = 2'-O-methylguanosine
  modified_base 28: mod_base = OTHER; note = 2'-fluorocytidine
  modified_base 29: mod_base = OTHER; note = 2'-O-methyluridine
  modified_base 30: mod_base = OTHER; note = 2'-fluorouridine
  modified_base 31: mod_base = OTHER; note = 2'-O-methyluridine
  modified_base 32: mod_base = OTHER; note = 2'-fluorouridine
  modified_base 33: mod_base = OTHER; note = 2'-O-methylguanosine
  modified_base 34: mod_base = OTHER; note = 2'-fluoroadenosine
ttccagctttattgggaggctgttttgcttttga

SEQ ID NO: 148 - RNA, 34 nt, synthetic construct
  source 1..34: mol_type = other RNA
  modified_base 1: mod_base = OTHER; note = Phosphate 2'-O-methyluridine, wherein phosphate may be absent
  modified_base 2: mod_base = OTHER; note = 2'-fluorouridine
  modified_base 3: mod_base = OTHER; note = 2'-O-methylcytidine
  modified_base 4: mod_base = OTHER; note = 2'-fluorocytidine
  modified_base 5: mod_base = OTHER; note = 2'-O-methyladenosine
  modified_base 6: mod_base = OTHER; note = 2'-fluoroguanosine
  modified_base 7: mod_base = OTHER; note = 2'-O-methylcytidine
  modified_base 8: mod_base = OTHER; note = 2'-fluorouridine
  modified_base 9: mod_base = OTHER; note = 2'-O-methyluridine
  modified_base 10: mod_base = OTHER; note = 2'-fluorouridine
  modified_base 11: mod_base = OTHER; note = 2'-O-methyladenosine
  modified_base 12: mod_base = OTHER; note = 2'-fluorouridine
  modified_base 13: mod_base = OTHER; note = 2'-O-methyluridine
  modified_base 14: mod_base = OTHER; note = 2'-fluoroguanosine
  modified_base 15: mod_base = OTHER; note = 2'-O-methylguanosine
  modified_base 16: mod_base = OTHER; note = 2'-fluoroguanosine
  modified_base 17: mod_base = OTHER; note = 2'-O-methyladenosine
  modified_base 18: mod_base = OTHER; note = 2'-fluoroguanosine
  modified_base 19: mod_base = OTHER; note = 2'-O-methylguanosine
  modified_base 20: mod_base = OTHER; note = 2'-fluoroadenosine
  modified_base 21: mod_base = OTHER; note = 2'-O-methyladenosine
  modified_base 22: mod_base = OTHER; note = 2'-fluoroguanosine
  modified_base 23: mod_base = OTHER; note = 2'-O-methyladenosine
  modified_base 24: mod_base = OTHER; note = 2'-fluorouridine
  modified_base 25: mod_base = OTHER; note = 2'-O-methyladenosine
  modified_base 26: mod_base = OTHER; note = 2'-fluorouridine
  modified_base 27: mod_base = OTHER; note = 2'-O-methyluridine
  modified_base 28: mod_base = OTHER; note = 2'-fluorouridine
  modified_base 29: mod_base = OTHER; note = 2'-O-methyladenosine
  modified_base 30: mod_base = OTHER; note = 2'-fluorouridine
  modified_base 31: mod_base = OTHER; note = 2'-O-methyluridine
  modified_base 32: mod_base = OTHER; note = 2'-fluorocytidine
  modified_base 33: mod_base = OTHER; note = 2'-O-methyluridine
  modified_base 34: mod_base = OTHER; note = 2'-fluoroadenosine
ttccagctttattgggaggaagatatttattcta

SEQ ID NO: 149 - RNA, 34 nt, synthetic construct
  source 1..34: mol_type = other RNA
  modified_base 1: mod_base = OTHER; note = Phosphate 2'-O-methyluridine, wherein phosphate may be absent
  modified_base 2: mod_base = OTHER; note = 2'-fluorouridine
  modified_base 3: mod_base = OTHER; note = 2'-O-methylcytidine
  modified_base 4: mod_base = OTHER; note = 2'-fluorocytidine
  modified_base 5: mod_base = OTHER; note = 2'-O-methyladenosine
  modified_base 6: mod_base = OTHER; note = 2'-fluoroguanosine
  modified_base 7: mod_base = OTHER; note = 2'-O-methylcytidine
  modified_base 8: mod_base = OTHER; note = 2'-fluorouridine
  modified_base 9: mod_base = OTHER; note = 2'-O-methyluridine
  modified_base 10: mod_base = OTHER; note = 2'-fluorouridine
  modified_base 11: mod_base = OTHER; note = 2'-O-methyladenosine
  modified_base 12: mod_base = OTHER; note = 2'-fluorouridine
  modified_base 13: mod_base = OTHER; note = 2'-O-methyluridine
  modified_base 14: mod_base = OTHER; note = 2'-fluoroguanosine
  modified_base 15: mod_base = OTHER; note = 2'-O-methylguanosine
  modified_base 16: mod_base = OTHER; note = 2'-fluoroguanosine
  modified_base 17: mod_base = OTHER; note = 2'-O-methyladenosine
  modified_base 18: mod_base = OTHER; note = 2'-fluoroguanosine
  modified_base 19: mod_base = OTHER; note = 2'-O-methylguanosine
  modified_base 20: mod_base = OTHER; note = 2'-fluoroadenosine
  modified_base 21: mod_base = OTHER; note = 2'-O-methylcytidine
  modified_base 22: mod_base = OTHER; note = 2'-fluorocytidine
  modified_base 23: mod_base = OTHER; note = 2'-O-methyluridine
  modified_base 24: mod_base = OTHER; note = 2'-fluoroguanosine
  modified_base 25: mod_base = OTHER; note = 2'-O-methyluridine
  modified_base 26: mod_base = OTHER; note = 2'-fluorouridine
  modified_base 27: mod_base = OTHER; note = 2'-O-methyluridine
  modified_base 28: mod_base = OTHER; note = 2'-fluorouridine
  modified_base 29: mod_base = OTHER; note = 2'-O-methylguanosine
  modified_base 30: mod_base = OTHER; note = 2'-fluorocytidine
  modified_base 31: mod_base = OTHER; note = 2'-O-methyluridine
  modified_base 32: mod_base = OTHER; note = 2'-fluorouridine
  modified_base 33: mod_base = OTHER; note = 2'-O-methyluridine
  modified_base 34: mod_base = OTHER; note = 2'-fluoroadenosine
ttccagctttattgggaggacctgttttgcttta

SEQ ID NO: 150 - RNA, 34 nt, synthetic construct
  source 1..34: mol_type = other RNA
  modified_base 1: mod_base = OTHER; note = Phosphate 2'-O-methyluridine, wherein phosphate may be absent
  modified_base 2: mod_base = OTHER; note = 2'-fluoroguanosine
  modified_base 3: mod_base = OTHER; note = 2'-O-methyluridine
  modified_base 4: mod_base = OTHER; note = 2'-fluorocytidine
  modified_base 5: mod_base = OTHER; note = 2'-O-methylcytidine
  modified_base 6: mod_base = OTHER; note = 2'-fluoroadenosine
  modified_base 7: mod_base = OTHER; note = 2'-O-methylguanosine
  modified_base 8: mod_base = OTHER; note = 2'-fluorocytidine
  modified_base 9: mod_base = OTHER; note = 2'-O-methyluridine
  modified_base 10: mod_base = OTHER; note = 2'-fluorouridine
  modified_base 11: mod_base = OTHER; note = 2'-O-methyluridine
  modified_base 12: mod_base = OTHER; note = 2'-fluoroadenosine
  modified_base 13: mod_base = OTHER; note = 2'-O-methyluridine
  modified_base 14: mod_base = OTHER; note = 2'-fluorouridine
  modified_base 15: mod_base = OTHER; note = 2'-O-methylguanosine
  modified_base 16: mod_base = OTHER; note = 2'-fluoroguanosine
  modified_base 17: mod_base = OTHER; note = 2'-O-methylguanosine
  modified_base 18: mod_base = OTHER; note = 2'-fluoroadenosine
  modified_base 19: mod_base = OTHER; note = 2'-O-methylguanosine
  modified_base 20: mod_base = OTHER; note = 2'-fluorouridine
  modified_base 21: mod_base = OTHER; note = 2'-O-methyluridine
  modified_base 22: mod_base = OTHER; note = 2'-fluorouridine
  modified_base 23: mod_base = OTHER; note = 2'-O-methylguanosine
  modified_base 24: mod_base = OTHER; note = 2'-fluorouridine
  modified_base 25: mod_base = OTHER; note = 2'-O-methyladenosine
  modified_base 26: mod_base = OTHER; note = 2'-fluoroadenosine
  modified_base 27: mod_base = OTHER; note = 2'-O-methylcytidine
  modified_base 28: mod_base = OTHER; note = 2'-fluorouridine
  modified_base 29: mod_base = OTHER; note = 2'-O-methyluridine
  modified_base 30: mod_base = OTHER; note = 2'-fluoroguanosine
  modified_base 31: mod_base = OTHER; note = 2'-O-methyladenosine
  modified_base 32: mod_base = OTHER; note = 2'-fluoroadenosine
  modified_base 33: mod_base = OTHER; note = 2'-O-methylguanosine
  modified_base 34: mod_base = OTHER; note = 2'-fluoroadenosine
tgtccagctttattgggagtttgtaacttgaaga

SEQ ID NO: 151 - RNA, 34 nt, synthetic construct
  source 1..34: mol_type = other RNA
  modified_base 1: mod_base = OTHER; note = Phosphate 2'-O-methyluridine, wherein phosphate may be absent
  modified_base 2: mod_base = OTHER; note = 2'-fluoroguanosine
  modified_base 3: mod_base = OTHER; note = 2'-O-methyluridine
  modified_base 4: mod_base = OTHER; note = 2'-fluorocytidine
  modified_base 5: mod_base = OTHER; note = 2'-O-methylcytidine
  modified_base 6: mod_base = OTHER; note = 2'-fluoroadenosine
  modified_base 7: mod_base = OTHER; note = 2'-O-methylguanosine
  modified_base 8: mod_base = OTHER; note = 2'-fluorocytidine
  modified_base 9: mod_base = OTHER; note = 2'-O-methyluridine
  modified_base 10: mod_base = OTHER; note = 2'-fluorouridine
  modified_base 11: mod_base = OTHER; note = 2'-O-methyluridine
  modified_base 12: mod_base = OTHER; note = 2'-fluoroadenosine
  modified_base 13: mod_base = OTHER; note = 2'-O-methyluridine
  modified_base 14: mod_base = OTHER; note = 2'-fluorouridine
  modified_base 15: mod_base = OTHER; note = 2'-O-methylguanosine
  modified_base 16: mod_base = OTHER; note = 2'-fluoroguanosine
  modified_base 17: mod_base = OTHER; note = 2'-O-methylguanosine
  modified_base 18: mod_base = OTHER; note = 2'-fluoroadenosine
  modified_base 19: mod_base = OTHER; note = 2'-O-methylguanosine
  modified_base 20: mod_base = OTHER; note = 2'-fluorocytidine
  modified_base 21: mod_base = OTHER; note = 2'-O-methylcytidine
  modified_base 22: mod_base = OTHER; note = 2'-fluorouridine
  modified_base 23: mod_base = OTHER; note = 2'-O-methylguanosine
  modified_base 24: mod_base = OTHER; note = 2'-fluorouridine
  modified_base 25: mod_base = OTHER; note = 2'-O-methyluridine
  modified_base 26: mod_base = OTHER; note = 2'-fluorouridine
  modified_base 27: mod_base = OTHER; note = 2'-O-methyluridine
  modified_base 28: mod_base = OTHER; note = 2'-fluoroguanosine
  modified_base 29: mod_base = OTHER; note = 2'-O-methylcytidine
  modified_base 30: mod_base = OTHER; note = 2'-fluorouridine
  modified_base 31: mod_base = OTHER; note = 2'-O-methyluridine
  modified_base 32: mod_base = OTHER; note = 2'-fluorouridine
  modified_base 33: mod_base = OTHER; note = 2'-O-methyluridine
  modified_base 34: mod_base = OTHER; note = 2'-fluoroadenosine
tgtccagctttattgggagcctgttttgctttta

SEQ ID NO: 152 - RNA, 34 nt, synthetic construct
  source 1..34: mol_type = other RNA
  modified_base 1: mod_base = OTHER; note = Phosphate 2'-O-methyluridine, wherein phosphate may be absent
  modified_base 2: mod_base = OTHER; note = 2'-fluoroguanosine
  modified_base 3: mod_base = OTHER; note = 2'-O-methyluridine
  modified_base 4: mod_base = OTHER; note = 2'-fluorocytidine
  modified_base 5: mod_base = OTHER; note = 2'-O-methylcytidine
  modified_base 6: mod_base = OTHER; note = 2'-fluoroadenosine
  modified_base 7: mod_base = OTHER; note = 2'-O-methylguanosine
  modified_base 8: mod_base = OTHER; note = 2'-fluorocytidine
  modified_base 9: mod_base = OTHER; note = 2'-O-methyluridine
  modified_base 10: mod_base = OTHER; note = 2'-fluorouridine
  modified_base 11: mod_base = OTHER; note = 2'-O-methyluridine
  modified_base 12: mod_base = OTHER; note = 2'-fluoroadenosine
  modified_base 13: mod_base = OTHER; note = 2'-O-methyluridine
  modified_base 14: mod_base = OTHER; note = 2'-fluorouridine
  modified_base 15: mod_base = OTHER; note = 2'-O-methylguanosine
  modified_base 16: mod_base = OTHER; note = 2'-fluoroguanosine
  modified_base 17: mod_base = OTHER; note = 2'-O-methylguanosine
  modified_base 18: mod_base = OTHER; note = 2'-fluoroadenosine
  modified_base 19: mod_base = OTHER; note = 2'-O-methylguanosine
  modified_base 20: mod_base = OTHER; note = 2'-fluorouridine
  modified_base 21: mod_base = OTHER; note = 2'-O-methylguanosine
  modified_base 22: mod_base = OTHER; note = 2'-fluorouridine
  modified_base 23: mod_base = OTHER; note = 2'-O-methyluridine
  modified_base 24: mod_base = OTHER; note = 2'-fluorouridine
  modified_base 25: mod_base = OTHER; note = 2'-O-methyluridine
  modified_base 26: mod_base = OTHER; note = 2'-fluoroguanosine
  modified_base 27: mod_base = OTHER; note = 2'-O-methylcytidine
  modified_base 28: mod_base = OTHER; note = 2'-fluorouridine
  modified_base 29: mod_base = OTHER; note = 2'-O-methyluridine
  modified_base 30: mod_base = OTHER; note = 2'-fluorouridine
  modified_base 31: mod_base = OTHER; note = 2'-O-methyluridine
  modified_base 32: mod_base = OTHER; note = 2'-fluoroguanosine
  modified_base 33: mod_base = OTHER; note = 2'-O-methyluridine
  modified_base 34: mod_base = OTHER; note = 2'-fluoroadenosine
tgtccagctttattgggagtgttttgcttttgta

SEQ ID NO: 153 - RNA, 34 nt, synthetic construct
  source 1..34: mol_type = other RNA
  modified_base 1: mod_base = OTHER; note = Phosphate 2'-O-methyluridine, wherein phosphate may be absent
  modified_base 2: mod_base = OTHER; note = 2'-fluoroguanosine
  modified_base 3: mod_base = OTHER; note = 2'-O-methyluridine
  modified_base 4: mod_base = OTHER; note = 2'-fluorocytidine
  modified_base 5: mod_base = OTHER; note = 2'-O-methylcytidine
  modified_base 6: mod_base = OTHER; note = 2'-fluoroadenosine
  modified_base 7: mod_base = OTHER; note = 2'-O-methylguanosine
  modified_base 8: mod_base = OTHER; note = 2'-fluorocytidine
  modified_base 9: mod_base = OTHER; note = 2'-O-methyluridine
  modified_base 10: mod_base = OTHER; note = 2'-fluorouridine
  modified_base 11: mod_base = OTHER; note = 2'-O-methyluridine
  modified_base 12: mod_base = OTHER; note = 2'-fluoroadenosine
  modified_base 13: mod_base = OTHER; note = 2'-O-methyluridine
  modified_base 14: mod_base = OTHER; note = 2'-fluorouridine
  modified_base 15: mod_base = OTHER; note = 2'-O-methylguanosine
  modified_base 16: mod_base = OTHER; note = 2'-fluoroguanosine
  modified_base 17: mod_base = OTHER; note = 2'-O-methylguanosine
  modified_base 18: mod_base = OTHER; note = 2'-fluoroadenosine
  modified_base 19: mod_base = OTHER; note = 2'-O-methylguanosine
  modified_base 20: mod_base = OTHER; note = 2'-fluorouridine
  modified_base 21: mod_base = OTHER; note = 2'-O-methyladenosine
  modified_base 22: mod_base = OTHER; note = 2'-fluoroguanosine
  modified_base 23: mod_base = OTHER; note = 2'-O-methyladenosine
  modified_base 24: mod_base = OTHER; note = 2'-fluorocytidine
  modified_base 25: mod_base = OTHER; note = 2'-O-methylcytidine
  modified_base 26: mod_base = OTHER; note = 2'-fluorouridine
  modified_base 27: mod_base = OTHER; note = 2'-O-methylguanosine
  modified_base 28: mod_base = OTHER; note = 2'-fluorouridine
  modified_base 29: mod_base = OTHER; note = 2'-O-methyluridine
  modified_base 30: mod_base = OTHER; note = 2'-fluorouridine
  modified_base 31: mod_base = OTHER; note = 2'-O-methyluridine
  modified_base 32: mod_base = OTHER; note = 2'-fluoroguanosine
  modified_base 33: mod_base = OTHER; note = 2'-O-methylcytidine
  modified_base 34: mod_base = OTHER; note = 2'-fluoroadenosine
tgtccagctttattgggagtagacctgttttgca

SEQ ID NO: 154 - RNA, 34 nt, synthetic construct
  source 1..34: mol_type = other RNA
  modified_base 1: mod_base = OTHER; note = Phosphate 2'-O-methyluridine, wherein phosphate may be absent
  modified_base 2: mod_base = OTHER; note = 2'-fluoroguanosine
  modified_base 3: mod_base = OTHER; note = 2'-O-methyluridine
  modified_base 4: mod_base = OTHER; note = 2'-fluorocytidine
  modified_base 5: mod_base = OTHER; note = 2'-O-methylcytidine
  modified_base 6: mod_base = OTHER; note = 2'-fluoroadenosine
  modified_base 7: mod_base = OTHER; note = 2'-O-methylguanosine
  modified_base 8: mod_base = OTHER; note = 2'-fluorocytidine
  modified_base 9: mod_base = OTHER; note = 2'-O-methyluridine
  modified_base 10: mod_base = OTHER; note = 2'-fluorouridine
  modified_base 11: mod_base = OTHER; note = 2'-O-methyluridine
  modified_base 12: mod_base = OTHER; note = 2'-fluoroadenosine
  modified_base 13: mod_base = OTHER; note = 2'-O-methyluridine
  modified_base 14: mod_base = OTHER; note = 2'-fluorouridine
  modified_base 15: mod_base = OTHER; note = 2'-O-methylguanosine
  modified_base 16: mod_base = OTHER; note = 2'-fluoroguanosine
  modified_base 17: mod_base = OTHER; note = 2'-O-methylguanosine
  modified_base 18: mod_base = OTHER; note = 2'-fluoroadenosine
  modified_base 19: mod_base = OTHER; note = 2'-O-methylguanosine
  modified_base 20: mod_base = OTHER; note = 2'-fluorocytidine
  modified_base 21: mod_base = OTHER; note = 2'-O-methyluridine
  modified_base 22: mod_base = OTHER; note = 2'-fluoroguanosine
  modified_base 23: mod_base = OTHER; note = 2'-O-methyluridine
  modified_base 24: mod_base = OTHER; note = 2'-fluorouridine
  modified_base 25: mod_base = OTHER; note = 2'-O-methyluridine
  modified_base 26: mod_base = OTHER; note = 2'-fluorouridine
  modified_base 27: mod_base = OTHER; note = 2'-O-methylguanosine
  modified_base 28: mod_base = OTHER; note = 2'-fluorocytidine
  modified_base 29: mod_base = OTHER; note = 2'-O-methyluridine
  modified_base 30: mod_base = OTHER; note = 2'-fluorouridine
  modified_base 31: mod_base = OTHER; note = 2'-O-methyluridine
  modified_base 32: mod_base = OTHER; note = 2'-fluorouridine
  modified_base 33: mod_base = OTHER; note = 2'-O-methylguanosine
  modified_base 34: mod_base = OTHER; note = 2'-fluoroadenosine
tgtccagctttattgggagctgttttgcttttga

SEQ ID NO: 155 - RNA, 34 nt, synthetic construct
  source 1..34: mol_type = other RNA
  modified_base 1: mod_base = OTHER; note = Phosphate 2'-O-methyluridine, wherein phosphate may be absent
  modified_base 2: mod_base = OTHER; note = 2'-fluoroguanosine
  modified_base 3: mod_base = OTHER; note = 2'-O-methyluridine
  modified_base 4: mod_base = OTHER; note = 2'-fluorocytidine
  modified_base 5: mod_base = OTHER; note = 2'-O-methylcytidine
  modified_base 6: mod_base = OTHER; note = 2'-fluoroadenosine
  modified_base 7: mod_base = OTHER; note = 2'-O-methylguanosine
  modified_base 8: mod_base = OTHER; note = 2'-fluorocytidine
  modified_base 9: mod_base = OTHER; note = 2'-O-methyluridine
  modified_base 10: mod_base = OTHER; note = 2'-fluorouridine
  modified_base 11: mod_base = OTHER; note = 2'-O-methyluridine
  modified_base 12: mod_base = OTHER; note = 2'-fluoroadenosine
  modified_base 13: mod_base = OTHER; note = 2'-O-methyluridine
  modified_base 14: mod_base = OTHER; note = 2'-fluorouridine
  modified_base 15: mod_base = OTHER; note = 2'-O-methylguanosine
  modified_base 16: mod_base = OTHER; note = 2'-fluoroguanosine
  modified_base 17: mod_base = OTHER; note = 2'-O-methylguanosine
  modified_base 18: mod_base = OTHER; note = 2'-fluoroadenosine
  modified_base 19: mod_base = OTHER; note = 2'-O-methylguanosine
  modified_base 20: mod_base = OTHER; note = 2'-fluoroadenosine
  modified_base 21: mod_base = OTHER; note = 2'-O-methyladenosine
  modified_base 22: mod_base = OTHER; note = 2'-fluoroguanosine
  modified_base 23: mod_base = OTHER; note = 2'-O-methyladenosine
  modified_base 24: mod_base = OTHER; note = 2'-fluorouridine
  modified_base 25: mod_base = OTHER; note = 2'-O-methyladenosine
  modified_base 26: mod_base = OTHER; note = 2'-fluorouridine
  modified_base 27: mod_base = OTHER; note = 2'-O-methyluridine
  modified_base 28: mod_base = OTHER; note = 2'-fluorouridine
  modified_base 29: mod_base = OTHER; note = 2'-O-methyladenosine
  modified_base 30: mod_base = OTHER; note = 2'-fluorouridine
  modified_base 31: mod_base = OTHER; note = 2'-O-methyluridine
  modified_base 32: mod_base = OTHER; note = 2'-fluorocytidine
  modified_base 33: mod_base = OTHER; note = 2'-O-methyluridine
  modified_base 34: mod_base = OTHER; note = 2'-fluoroadenosine
tgtccagctttattgggagaagatatttattcta

SEQ ID NO: 156 - RNA, 34 nt, synthetic construct
  source 1..34: mol_type = other RNA
  modified_base 1: mod_base = OTHER; note = Phosphate 2'-O-methyluridine, wherein phosphate may be absent
  modified_base 2: mod_base = OTHER; note = 2'-fluoroguanosine
  modified_base 3: mod_base = OTHER; note = 2'-O-methyluridine
  modified_base 4: mod_base = OTHER; note = 2'-fluorocytidine
  modified_base 5: mod_base = OTHER; note = 2'-O-methylcytidine
  modified_base 6: mod_base = OTHER; note = 2'-fluoroadenosine
  modified_base 7: mod_base = OTHER; note = 2'-O-methylguanosine
  modified_base 8: mod_base = OTHER; note = 2'-fluorocytidine
  modified_base 9: mod_base = OTHER; note = 2'-O-methyluridine
  modified_base 10: mod_base = OTHER; note = 2'-fluorouridine
  modified_base 11: mod_base = OTHER; note = 2'-O-methyluridine
  modified_base 12: mod_base = OTHER; note = 2'-fluoroadenosine
  modified_base 13: mod_base = OTHER; note = 2'-O-methyluridine
  modified_base 14: mod_base = OTHER; note = 2'-fluorouridine
  modified_base 15: mod_base = OTHER; note = 2'-O-methylguanosine
  modified_base 16: mod_base = OTHER; note = 2'-fluoroguanosine
  modified_base 17: mod_base = OTHER; note = 2'-O-methylguanosine
  modified_base 18: mod_base = OTHER; note = 2'-fluoroadenosine
  modified_base 19: mod_base = OTHER; note = 2'-O-methylguanosine
  modified_base 20: mod_base = OTHER; note = 2'-fluoroadenosine
  modified_base 21: mod_base = OTHER; note = 2'-O-methylcytidine
  modified_base 22: mod_base = OTHER; note = 2'-fluorocytidine
  modified_base 23: mod_base = OTHER; note = 2'-O-methyluridine
  modified_base 24: mod_base = OTHER; note = 2'-fluoroguanosine
  modified_base 25: mod_base = OTHER; note = 2'-O-methyluridine
  modified_base 26: mod_base = OTHER; note = 2'-fluorouridine
  modified_base 27: mod_base = OTHER; note = 2'-O-methyluridine
  modified_base 28: mod_base = OTHER; note = 2'-fluorouridine
  modified_base 29: mod_base = OTHER; note = 2'-O-methylguanosine
  modified_base 30: mod_base = OTHER; note = 2'-fluorocytidine
  modified_base 31: mod_base = OTHER; note = 2'-O-methyluridine
  modified_base 32: mod_base = OTHER; note = 2'-fluorouridine
  modified_base 33: mod_base = OTHER; note = 2'-O-methyluridine
  modified_base 34: mod_base = OTHER; note = 2'-fluoroadenosine
tgtccagctttattgggagacctgttttgcttta

SEQ ID NO: 157 - RNA, 34 nt, synthetic construct
  source 1..34: mol_type = other RNA
  modified_base 1: mod_base = OTHER; note = Phosphate 2'-O-methyluridine, wherein phosphate may be absent
  modified_base 2: mod_base = OTHER; note = 2'-fluorocytidine
  modified_base 3: mod_base = OTHER; note = 2'-O-methyladenosine
  modified_base 4: mod_base = OTHER; note = 2'-fluorocytidine
  modified_base 5: mod_base = OTHER; note = 2'-O-methyluridine
  modified_base 6: mod_base = OTHER; note = 2'-fluoroguanosine
  modified_base 7: mod_base = OTHER; note = 2'-O-methyladenosine
  modified_base 8: mod_base = OTHER; note = 2'-fluoroguanosine
  modified_base 9: mod_base = OTHER; note = 2'-O-methyladenosine
  modified_base 10: mod_base = OTHER; note = 2'-fluoroadenosine
  modified_base 11: mod_base = OTHER; note = 2'-O-methyluridine
  modified_base 12: mod_base = OTHER; note = 2'-fluoroadenosine
  modified_base 13: mod_base = OTHER; note = 2'-O-methylcytidine
  modified_base 14: mod_base = OTHER; note = 2'-fluorouridine
  modified_base 15: mod_base = OTHER; note = 2'-O-methylguanosine
  modified_base 16: mod_base = OTHER; note = 2'-fluorouridine
  modified_base 17: mod_base = OTHER; note = 2'-O-methylcytidine
  modified_base 18: mod_base = OTHER; note = 2'-fluorocytidine
  modified_base 19: mod_base = OTHER; note = 2'-O-methylcytidine
  modified_base 20: mod_base = OTHER; note = 2'-fluorouridine
  modified_base 21: mod_base = OTHER; note = 2'-O-methyluridine
  modified_base 22: mod_base = OTHER; note = 2'-fluorouridine
  modified_base 23: mod_base = OTHER; note = 2'-O-methylguanosine
  modified_base 24: mod_base = OTHER; note = 2'-fluorouridine
  modified_base 25: mod_base = OTHER; note = 2'-O-methyladenosine
  modified_base 26: mod_base = OTHER; note = 2'-fluoroadenosine
  modified_base 27: mod_base = OTHER; note = 2'-O-methylcytidine
  modified_base 28: mod_base = OTHER; note = 2'-fluorouridine
  modified_base 29: mod_base = OTHER; note = 2'-O-methyluridine
  modified_base 30: mod_base = OTHER; note = 2'-fluoroguanosine
  modified_base 31: mod_base = OTHER; note = 2'-O-methyladenosine
  modified_base 32: mod_base = OTHER; note = 2'-fluoroadenosine
  modified_base 33: mod_base = OTHER; note = 2'-O-methylguanosine
  modified_base 34: mod_base = OTHER; note = 2'-fluoroadenosine
tcactgagaatactgtccctttgtaacttgaaga

SEQ ID NO: 158 - RNA, 34 nt, synthetic construct
  source 1..34: mol_type = other RNA
  modified_base 1: mod_base = OTHER; note = Phosphate 2'-O-methyluridine, wherein phosphate may be absent
  modified_base 2: mod_base = OTHER; note = 2'-fluorocytidine
  modified_base 3: mod_base = OTHER; note = 2'-O-methyladenosine
  modified_base 4: mod_base = OTHER; note = 2'-fluorocytidine
  modified_base 5: mod_base = OTHER; note = 2'-O-methyluridine
  modified_base 6: mod_base = OTHER; note = 2'-fluoroguanosine
  modified_base 7: mod_base = OTHER; note = 2'-O-methyladenosine
  modified_base 8: mod_base = OTHER; note = 2'-fluoroguanosine
  modified_base 9: mod_base = OTHER; note = 2'-O-methyladenosine
  modified_base 10: mod_base = OTHER; note = 2'-fluoroadenosine
  modified_base 11: mod_base = OTHER; note = 2'-O-methyluridine
  modified_base 12: mod_base = OTHER; note = 2'-fluoroadenosine
  modified_base 13: mod_base = OTHER; note = 2'-O-methylcytidine
  modified_base 14: mod_base = OTHER; note = 2'-fluorouridine
  modified_base 15: mod_base = OTHER; note = 2'-O-methylguanosine
  modified_base 16: mod_base = OTHER; note = 2'-fluorouridine
  modified_base 17: mod_base = OTHER; note = 2'-O-methylcytidine
  modified_base 18: mod_base = OTHER; note = 2'-fluorocytidine
  modified_base 19: mod_base = OTHER; note = 2'-O-methylcytidine
  modified_base 20: mod_base = OTHER; note = 2'-fluorocytidine
  modified_base 21: mod_base = OTHER; note = 2'-O-methylcytidine
  modified_base 22: mod_base = OTHER; note = 2'-fluorouridine
  modified_base 23: mod_base = OTHER; note = 2'-O-methylguanosine
  modified_base 24: mod_base = OTHER; note = 2'-fluorouridine
  modified_base 25: mod_base = OTHER; note = 2'-O-methyluridine
  modified_base 26: mod_base = OTHER; note = 2'-fluorouridine
  modified_base 27: mod_base = OTHER; note = 2'-O-methyluridine
  modified_base 28: mod_base = OTHER; note = 2'-fluoroguanosine
  modified_base 29: mod_base = OTHER; note = 2'-O-methylcytidine
  modified_base 30: mod_base = OTHER; note = 2'-fluorouridine
  modified_base 31: mod_base = OTHER; note = 2'-O-methyluridine
  modified_base 32: mod_base = OTHER; note = 2'-fluorouridine
  modified_base 33: mod_base = OTHER; note = 2'-O-methyluridine
  modified_base 34: mod_base = OTHER; note = 2'-fluoroadenosine
tcactgagaatactgtccccctgttttgctttta

SEQ ID NO: 159 - RNA, 34 nt, synthetic construct
  source 1..34: mol_type = other RNA
  modified_base 1: mod_base = OTHER; note = Phosphate 2'-O-methyluridine, wherein phosphate may be absent
  modified_base 2: mod_base = OTHER; note = 2'-fluorocytidine
  modified_base 3: mod_base = OTHER; note = 2'-O-methyladenosine
  modified_base 4: mod_base = OTHER; note = 2'-fluorocytidine
  modified_base 5: mod_base = OTHER; note = 2'-O-methyluridine
  modified_base 6: mod_base = OTHER; note = 2'-fluoroguanosine
  modified_base 7: mod_base = OTHER; note = 2'-O-methyladenosine
  modified_base 8: mod_base = OTHER; note = 2'-fluoroguanosine
  modified_base 9: mod_base = OTHER; note = 2'-O-methyladenosine
  modified_base 10: mod_base = OTHER; note = 2'-fluoroadenosine
  modified_base 11: mod_base = OTHER; note = 2'-O-methyluridine
  modified_base 12: mod_base = OTHER; note = 2'-fluoroadenosine
  modified_base 13: mod_base = OTHER; note = 2'-O-methylcytidine
  modified_base 14: mod_base = OTHER; note = 2'-fluorouridine
  modified_base 15: mod_base = OTHER; note = 2'-O-methylguanosine
  modified_base 16: mod_base = OTHER; note = 2'-fluorouridine
  modified_base 17: mod_base = OTHER; note = 2'-O-methylcytidine
  modified_base 18: mod_base = OTHER; note = 2'-fluorocytidine
  modified_base 19: mod_base = OTHER; note = 2'-O-methylcytidine
  modified_base 20: mod_base = OTHER; note = 2'-fluorouridine
  modified_base 21: mod_base = OTHER; note = 2'-O-methylguanosine
  modified_base 22: mod_base = OTHER; note = 2'-fluorouridine
  modified_base 23: mod_base = OTHER; note = 2'-O-methyluridine
  modified_base 24: mod_base = OTHER; note = 2'-fluorouridine
  modified_base 25: mod_base = OTHER; note = 2'-O-methyluridine
  modified_base 26: mod_base = OTHER; note = 2'-fluoroguanosine
  modified_base 27: mod_base = OTHER; note = 2'-O-methylcytidine
  modified_base 28: mod_base = OTHER; note = 2'-fluorouridine
  modified_base 29: mod_base = OTHER; note = 2'-O-methyluridine
  modified_base 30: mod_base = OTHER; note = 2'-fluorouridine
  modified_base 31: mod_base = OTHER; note = 2'-O-methyluridine
  modified_base 32: mod_base = OTHER; note = 2'-fluoroguanosine
  modified_base 33: mod_base = OTHER; note = 2'-O-methyluridine
  modified_base 34: mod_base = OTHER; note = 2'-fluoroadenosine
tcactgagaatactgtccctgttttgcttttgta

SEQ ID NO: 160 - RNA, 34 nt, synthetic construct
  source 1..34: mol_type = other RNA
  modified_base 1: mod_base = OTHER; note = Phosphate 2'-O-methyluridine, wherein phosphate may be absent
  modified_base 2: mod_base = OTHER; note = 2'-fluorocytidine
  modified_base 3: mod_base = OTHER; note = 2'-O-methyladenosine
  modified_base 4: mod_base = OTHER; note = 2'-fluorocytidine
  modified_base 5: mod_base = OTHER; note = 2'-O-methyluridine
  modified_base 6: mod_base = OTHER; note = 2'-fluoroguanosine
  modified_base 7: mod_base = OTHER; note = 2'-O-methyladenosine
  modified_base 8: mod_base = OTHER; note = 2'-fluoroguanosine
  modified_base 9: mod_base = OTHER; note = 2'-O-methyladenosine
  modified_base 10: mod_base = OTHER; note = 2'-fluoroadenosine
  modified_base 11: mod_base = OTHER; note = 2'-O-methyluridine
  modified_base 12: mod_base = OTHER; note = 2'-fluoroadenosine
  modified_base 13: mod_base = OTHER; note = 2'-O-methylcytidine
  modified_base 14: mod_base = OTHER; note = 2'-fluorouridine
  modified_base 15: mod_base = OTHER; note = 2'-O-methylguanosine
  modified_base 16: mod_base = OTHER; note = 2'-fluorouridine
  modified_base 17: mod_base = OTHER; note = 2'-O-methylcytidine
  modified_base 18: mod_base = OTHER; note = 2'-fluorocytidine
  modified_base 19: mod_base = OTHER; note = 2'-O-methylcytidine
  modified_base 20: mod_base = OTHER; note = 2'-fluorouridine
  modified_base 21: mod_base = OTHER; note = 2'-O-methyladenosine
  modified_base 22: mod_base = OTHER; note = 2'-fluoroguanosine
  modified_base 23: mod_base = OTHER; note = 2'-O-methyladenosine
  modified_base 24: mod_base = OTHER; note = 2'-fluorocytidine
  modified_base 25: mod_base = OTHER; note = 2'-O-methylcytidine
  modified_base 26: mod_base = OTHER; note = 2'-fluorouridine
  modified_base 27: mod_base = OTHER; note = 2'-O-methylguanosine
  modified_base 28: mod_base = OTHER; note = 2'-fluorouridine
  modified_base 29: mod_base = OTHER; note = 2'-O-methyluridine
  modified_base 30: mod_base = OTHER; note = 2'-fluorouridine
  modified_base 31: mod_base = OTHER; note = 2'-O-methyluridine
  modified_base 32: mod_base = OTHER; note = 2'-fluoroguanosine
  modified_base 33: mod_base = OTHER; note = 2'-O-methylcytidine
  modified_base 34: mod_base = OTHER; note = 2'-fluoroadenosine
tcactgagaatactgtccctagacctgttttgca

SEQ ID NO: 161 - RNA, 34 nt, synthetic construct
  source 1..34: mol_type = other RNA
  modified_base 1: mod_base = OTHER; note = Phosphate 2'-O-methyluridine, wherein phosphate may be absent
  modified_base 2: mod_base = OTHER; note = 2'-fluorocytidine
  modified_base 3: mod_base = OTHER; note = 2'-O-methyladenosine
  modified_base 4: mod_base = OTHER; note = 2'-fluorocytidine
  modified_base 5: mod_base = OTHER; note = 2'-O-methyluridine
  modified_base 6: mod_base = OTHER; note = 2'-fluoroguanosine
  modified_base 7: mod_base = OTHER; note = 2'-O-methyladenosine
  modified_base 8: mod_base = OTHER; note = 2'-fluoroguanosine
  modified_base 9: mod_base = OTHER; note = 2'-O-methyladenosine
  modified_base 10: mod_base = OTHER; note = 2'-fluoroadenosine
  modified_base 11: mod_base = OTHER; note = 2'-O-methyluridine
  modified_base 12: mod_base = OTHER; note = 2'-fluoroadenosine
  modified_base 13: mod_base = OTHER; note = 2'-O-methylcytidine
  modified_base 14: mod_base = OTHER; note = 2'-fluorouridine
  modified_base 15: mod_base = OTHER; note = 2'-O-methylguanosine
  modified_base 16: mod_base = OTHER; note = 2'-fluorouridine
  modified_base 17: mod_base = OTHER; note = 2'-O-methylcytidine
  modified_base 18: mod_base = OTHER; note = 2'-fluorocytidine
  modified_base 19: mod_base = OTHER; note = 2'-O-methylcytidine
  modified_base 20: mod_base = OTHER; note = 2'-fluorocytidine
  modified_base 21: mod_base = OTHER; note = 2'-O-methyluridine
  modified_base 22: mod_base = OTHER; note = 2'-fluoroguanosine
  modified_base 23: mod_base = OTHER; note = 2'-O-methyluridine
  modified_base 24: mod_base = OTHER; note = 2'-fluorouridine
  modified_base 25: mod_base = OTHER; note = 2'-O-methyluridine
  modified_base 26: mod_base = OTHER; note = 2'-fluorouridine
  modified_base 27: mod_base = OTHER; note = 2'-O-methylguanosine
  modified_base 28: mod_base = OTHER; note = 2'-fluorocytidine
  modified_base 29: mod_base = OTHER; note = 2'-O-methyluridine
  modified_base 30: mod_base = OTHER; note = 2'-fluorouridine
  modified_base 31: mod_base = OTHER; note = 2'-O-methyluridine
  modified_base 32: mod_base = OTHER; note = 2'-fluorouridine
  modified_base 33: mod_base = OTHER; note = 2'-O-methylguanosine
  modified_base 34: mod_base = OTHER; note = 2'-fluoroadenosine
tcactgagaatactgtcccctgttttgcttttga

SEQ ID NO: 162 - RNA, 34 nt, synthetic construct
  source 1..34: mol_type = other RNA
  modified_base 1: mod_base = OTHER; note = Phosphate 2'-O-methyluridine, wherein phosphate may be absent
  modified_base 2: mod_base = OTHER; note = 2'-fluorocytidine
  modified_base 3: mod_base = OTHER; note = 2'-O-methyladenosine
  modified_base 4: mod_base = OTHER; note = 2'-fluorocytidine
  modified_base 5: mod_base = OTHER; note = 2'-O-methyluridine
  modified_base 6: mod_base = OTHER; note = 2'-fluoroguanosine
  modified_base 7: mod_base = OTHER; note = 2'-O-methyladenosine
  modified_base 8: mod_base = OTHER; note = 2'-fluoroguanosine
  modified_base 9: mod_base = OTHER; note = 2'-O-methyladenosine
  modified_base 10: mod_base = OTHER; note = 2'-fluoroadenosine
  modified_base 11: mod_base = OTHER; note = 2'-O-methyluridine
  modified_base 12: mod_base = OTHER; note = 2'-fluoroadenosine
  modified_base 13: mod_base = OTHER; note = 2'-O-methylcytidine
  modified_base 14: mod_base = OTHER; note = 2'-fluorouridine
  modified_base 15: mod_base = OTHER; note = 2'-O-methylguanosine
  modified_base 16: mod_base = OTHER; note = 2'-fluorouridine
  modified_base 17: mod_base = OTHER; note = 2'-O-methylcytidine
  modified_base 18: mod_base = OTHER; note = 2'-fluorocytidine
  modified_base 19: mod_base = OTHER; note = 2'-O-methylcytidine
  modified_base 20: mod_base = OTHER; note = 2'-fluoroadenosine
  modified_base 21: mod_base = OTHER; note = 2'-O-methyladenosine
  modified_base 22: mod_base = OTHER; note = 2'-fluoroguanosine
  modified_base 23: mod_base = OTHER; note = 2'-O-methyladenosine
  modified_base 24: mod_base = OTHER; note = 2'-fluorouridine
  modified_base 25: mod_base = OTHER; note = 2'-O-methyladenosine
  modified_base 26: mod_base = OTHER; note = 2'-fluorouridine
  modified_base 27: mod_base = OTHER; note = 2'-O-methyluridine
  modified_base 28: mod_base = OTHER; note = 2'-fluorouridine
  modified_base 29: mod_base = OTHER; note = 2'-O-methyladenosine
  modified_base 30: mod_base = OTHER; note = 2'-fluorouridine
  modified_base 31: mod_base = OTHER; note = 2'-O-methyluridine
  modified_base 32: mod_base = OTHER; note = 2'-fluorocytidine
  modified_base 33: mod_base = OTHER; note = 2'-O-methyluridine
  modified_base 34: mod_base = OTHER; note = 2'-fluoroadenosine
tcactgagaatactgtcccaagatatttattcta

SEQ ID NO: 163 - RNA, 34 nt, synthetic construct
  source 1..34: mol_type = other RNA
  modified_base 1: mod_base = OTHER; note = Phosphate 2'-O-methyluridine, wherein phosphate may be absent
  modified_base 2: mod_base = OTHER; note = 2'-fluorocytidine
  modified_base 3: mod_base = OTHER; note = 2'-O-methyladenosine
  modified_base 4: mod_base = OTHER; note = 2'-fluorocytidine
  modified_base 5: mod_base = OTHER; note = 2'-O-methyluridine
  modified_base 6: mod_base = OTHER; note = 2'-fluoroguanosine
  modified_base 7: mod_base = OTHER; note = 2'-O-methyladenosine
  modified_base 8: mod_base = OTHER; note = 2'-fluoroguanosine
  modified_base 9: mod_base = OTHER; note = 2'-O-methyladenosine
  modified_base 10: mod_base = OTHER; note = 2'-fluoroadenosine
  modified_base 11: mod_base = OTHER; note = 2'-O-methyluridine
  modified_base 12: mod_base = OTHER; note = 2'-fluoroadenosine
  modified_base 13: mod_base = OTHER; note = 2'-O-methylcytidine
  modified_base 14: mod_base = OTHER; note = 2'-fluorouridine
  modified_base 15: mod_base = OTHER; note = 2'-O-methylguanosine
  modified_base 16: mod_base = OTHER; note = 2'-fluorouridine
  modified_base 17: mod_base = OTHER; note = 2'-O-methylcytidine
  modified_base 18: mod_base = OTHER; note = 2'-fluorocytidine
  modified_base 19: mod_base = OTHER; note = 2'-O-methylcytidine
  modified_base 20: mod_base = OTHER; note = 2'-fluoroadenosine
  modified_base 21: mod_base = OTHER; note = 2'-O-methylcytidine
  modified_base 22: mod_base = OTHER; note = 2'-fluorocytidine
  modified_base 23: mod_base = OTHER; note = 2'-O-methyluridine
  modified_base 24: mod_base = OTHER; note = 2'-fluoroguanosine
  modified_base 25: mod_base = OTHER; note = 2'-O-methyluridine
  modified_base 26: mod_base = OTHER; note = 2'-fluorouridine
  modified_base 27: mod_base = OTHER; note = 2'-O-methyluridine
  modified_base 28: mod_base = OTHER; note = 2'-fluorouridine
  modified_base 29: mod_base = OTHER; note = 2'-O-methylguanosine
  modified_base 30: mod_base = OTHER; note = 2'-fluorocytidine
  modified_base 31: mod_base = OTHER; note = 2'-O-methyluridine
  modified_base 32: mod_base = OTHER; note = 2'-fluorouridine
  modified_base 33: mod_base = OTHER; note = 2'-O-methyluridine
  modified_base 34: mod_base = OTHER; note = 2'-fluoroadenosine
tcactgagaatactgtcccacctgttttgcttta

SEQ ID NO: 164 - RNA, 33 nt, synthetic construct
  source 1..33: mol_type = other RNA
  modified_base 1: mod_base = OTHER; note = 2'-O-methyluridine phosphorothioate
  modified_base 2: mod_base = OTHER; note = 2'-fluorouridine phosphorothioate
  modified_base 3: mod_base = OTHER; note = 2'-O-methylguanosine
  modified_base 4: mod_base = OTHER; note = 2'-fluoroguanosine
  modified_base 5: mod_base = OTHER; note = 2'-O-methyladenosine
  modified_base 6: mod_base = OTHER; note = 2'-fluorouridine
  modified_base 7: mod_base = OTHER; note = 2'-O-methyladenosine
  modified_base 8: mod_base = OTHER; note = 2'-fluoroguanosine
  modified_base 9: mod_base = OTHER; note = 2'-O-methylguanosine
  modified_base 10: mod_base = OTHER; note = 2'-fluorocytidine
  modified_base 11: mod_base = OTHER; note = 2'-O-methyladenosine
  modified_base 12: mod_base = OTHER; note = 2'-fluoroguanosine
  modified_base 13: mod_base = OTHER; note = 2'-O-methylguanosine
  modified_base 14: mod_base = OTHER; note = 2'-fluorouridine phosphorothioate
  modified_base 15: mod_base = OTHER; note = 2'-O-methylguanosine phosphorothioate
  modified_base 16: mod_base = OTHER; note = 2'-fluoroguanosine phosphorothioate
  modified_base 17: mod_base = OTHER; note = 2'-O-methyladenosine phosphorothioate
  modified_base 18: mod_base = OTHER; note = 2'-fluorocytidine phosphorothioate
  modified_base 20: mod_base = OTHER; note = 2'-O-methyladenosine phosphorothioate
  modified_base 21: mod_base = OTHER; note = 2'-fluoroguanosine phosphorothioate
  modified_base 22: mod_base = OTHER; note = 2'-O-methyladenosine
  modified_base 23: mod_base = OTHER; note = 2'-fluorocytidine
  modified_base 24: mod_base = OTHER; note = 2'-O-methylcytidine
  modified_base 25: mod_base = OTHER; note = 2'-fluorouridine
  modified_base 26: mod_base = OTHER; note = 2'-O-methylguanosine
  modified_base 27: mod_base = OTHER; note = 2'-fluorouridine
  modified_base 28: mod_base = OTHER; note = 2'-O-methyluridine
  modified_base 29: mod_base = OTHER; note = 2'-fluorouridine
  modified_base 30: mod_base = OTHER; note = 2'-O-methyluridine
  modified_base 31: mod_base = OTHER; note = 2'-O-methylguanosine phosphorothioate
  modified_base 32: mod_base = OTHER; note = 2'-O-methylcytidine phosphorothioate
  modified_base 33: mod_base = OTHER; note = 2'-O-methyladenosine phosphorothioate trivalent N-acetyl-galactosamine
ttggataggcaggtggactagacctgttttgca

SEQ ID NO: 165 - RNA, 33 nt, synthetic construct
  source 1..33: mol_type = other RNA
  modified_base 1: mod_base = OTHER; note = 2'-O-methyluridine phosphorothioate
  modified_base 2: mod_base = OTHER; note = 2'-fluorouridine phosphorothioate
  modified_base 3: mod_base = OTHER; note = 2'-O-methylguanosine
  modified_base 4: mod_base = OTHER; note = 2'-fluoroguanosine
  modified_base 5: mod_base = OTHER; note = 2'-O-methyladenosine
  modified_base 6: mod_base = OTHER; note = 2'-fluorouridine
  modified_base 7: mod_base = OTHER; note = 2'-O-methyladenosine
  modified_base 8: mod_base = OTHER; note = 2'-fluoroguanosine
  modified_base 9: mod_base = OTHER; note = 2'-O-methylguanosine
  modified_base 10: mod_base = OTHER; note = 2'-fluorocytidine
  modified_base 11: mod_base = OTHER; note = 2'-O-methyladenosine
  modified_base 12: mod_base = OTHER; note = 2'-fluoroguanosine
  modified_base 13: mod_base = OTHER; note = 2'-O-methylguanosine
  modified_base 14: mod_base = OTHER; note = 2'-fluorouridine phosphorothioate
  modified_base 15: mod_base = OTHER; note = 2'-O-methylguanosine phosphorothioate
  modified_base 16: mod_base = OTHER; note = 2'-fluoroguanosine phosphorothioate
  modified_base 17: mod_base = OTHER; note = 2'-O-methyladenosine phosphorothioate
  modified_base 18: mod_base = OTHER; note = 2'-fluorocytidine phosphorothioate
  modified_base 20: mod_base = OTHER; note = 2'-O-methyladenosine phosphorothioate
  modified_base 21: mod_base = OTHER; note = 2'-fluoroguanosine phosphorothioate
  modified_base 22: mod_base = OTHER; note = 2'-O-methyladenosine
  modified_base 23: mod_base = OTHER; note = 2'-fluorouridine
  modified_base 24: mod_base = OTHER; note = 2'-O-methyladenosine
  modified_base 25: mod_base = OTHER; note = 2'-fluorouridine
  modified_base 26: mod_base = OTHER; note = 2'-O-methyluridine
  modified_base 27: mod_base = OTHER; note = 2'-fluorouridine
  modified_base 28: mod_base = OTHER; note = 2'-O-methyladenosine
  modified_base 29: mod_base = OTHER; note = 2'-fluorouridine
  modified_base 30: mod_base = OTHER; note = 2'-O-methyluridine
  modified_base 31: mod_base = OTHER; note = 2'-O-methylcytidine phosphorothioate
  modified_base 32: mod_base = OTHER; note = 2'-O-methyluridine phosphorothioate
  modified_base 33: mod_base = OTHER; note = 2'-O-methyladenosine phosphorothioate trivalent N-acetyl-galactosamine
ttggataggcaggtggactagatatttattcta

SEQ ID NO: 166 - RNA, 33 nt, synthetic construct
  source 1..33: mol_type = other RNA
  modified_base 1: mod_base = OTHER; note = 2'-O-methyluridine phosphorothioate
  modified_base 2: mod_base = OTHER; note = 2'-fluorocytidine phosphorothioate
  modified_base 3: mod_base = OTHER; note = 2'-O-methyladenosine
  modified_base 4: mod_base = OTHER; note = 2'-fluoroadenosine
  modified_base 5: mod_base = OTHER; note = 2'-O-methylcytidine
  modified_base 6: mod_base = OTHER; note = 2'-fluoroadenosine
  modified_base 7: mod_base = OTHER; note = 2'-O-methyladenosine
  modified_base 8: mod_base = OTHER; note = 2'-fluoroguanosine
  modified_base 9: mod_base = OTHER; note = 2'-O-methylguanosine
  modified_base 10: mod_base = OTHER; note = 2'-fluoroadenosine
  modified_base 11: mod_base = OTHER; note = 2'-O-methylguanosine
  modified_base 12: mod_base = OTHER; note = 2'-fluorouridine
  modified_base 13: mod_base = OTHER; note = 2'-O-methyladenosine
  modified_base 14: mod_base = OTHER; note = 2'-fluorocytidine phosphorothioate
  modified_base 15: mod_base = OTHER; note = 2'-O-methylcytidine phosphorothioate
  modified_base 16: mod_base = OTHER; note = 2'-fluorocytidine phosphorothioate
  modified_base 17: mod_base = OTHER; note = 2'-O-methylguanosine phosphorothioate
  modified_base 18: mod_base = OTHER; note = 2'-fluoroguanosine phosphorothioate
  modified_base 20: mod_base = OTHER; note = 2'-O-methyluridine phosphorothioate
  modified_base 21: mod_base = OTHER; note = 2'-fluoroguanosine phosphorothioate
  modified_base 22: mod_base = OTHER; note = 2'-O-methylcytidine
  modified_base 23: mod_base = OTHER; note = 2'-fluorouridine
  modified_base 24: mod_base = OTHER; note = 2'-O-methyluridine
  modified_base 25: mod_base = OTHER; note = 2'-fluorouridine
  modified_base 26: mod_base = OTHER; note = 2'-O-methylguanosine
  modified_base 27: mod_base = OTHER; note = 2'-fluorouridine
  modified_base 28: mod_base = OTHER; note = 2'-O-methylguanosine
  modified_base 29: mod_base = OTHER; note = 2'-fluorouridine
  modified_base 30: mod_base = OTHER; note = 2'-O-methylcytidine
  modified_base 31: mod_base = OTHER; note = 2'-O-methyladenosine phosphorothioate
  modified_base 32: mod_base = OTHER; note = 2'-O-methylcytidine phosphorothioate
  modified_base 33: mod_base = OTHER; note = 2'-O-methyladenosine phosphorothioate trivalent N-acetyl-galactosamine
tcaacaaggagtacccgggtgctttgtgtcaca

SEQ ID NO: 167 - RNA, 33 nt, synthetic construct
  source 1..33: mol_type = other RNA
  modified_base 1: mod_base = OTHER; note = 2'-O-methyluridine phosphorothioate
  modified_base 2: mod_base = OTHER; note = 2'-fluorouridine phosphorothioate
  modified_base 3: mod_base = OTHER; note = 2'-O-methylguanosine
  modified_base 4: mod_base = OTHER; note = 2'-fluoroguanosine
  modified_base 5: mod_base = OTHER; note = 2'-O-methyladenosine
  modified_base 6: mod_base = OTHER; note = 2'-fluorouridine
  modified_base 7: mod_base = OTHER; note = 2'-O-methyladenosine
  modified_base 8: mod_base = OTHER; note = 2'-fluoroguanosine
  modified_base 9: mod_base = OTHER; note = 2'-O-methylguanosine
  modified_base 10: mod_base = OTHER; note = 2'-fluorocytidine
  modified_base 11: mod_base = OTHER; note = 2'-O-methyladenosine
  modified_base 12: mod_base = OTHER; note = 2'-fluoroguanosine
  modified_base 13: mod_base = OTHER; note = 2'-O-methylguanosine
  modified_base 14: mod_base = OTHER; note = 2'-fluorouridine phosphorothioate
  modified_base 15: mod_base = OTHER; note = 2'-O-methylguanosine phosphorothioate
  modified_base 16: mod_base = OTHER; note = 2'-fluoroguanosine phosphorothioate
  modified_base 17: mod_base = OTHER; note = 2'-O-methyladenosine phosphorothioate
  modified_base 18: mod_base = OTHER; note = 2'-fluorocytidine phosphorothioate
  modified_base 20: mod_base = OTHER; note = 2'-O-methyluridine phosphorothioate
  modified_base 21: mod_base = OTHER; note = 2'-fluoroguanosine phosphorothioate
  modified_base 22: mod_base = OTHER; note = 2'-O-methylcytidine
  modified_base 23: mod_base = OTHER; note = 2'-fluorouridine
  modified_base 24: mod_base = OTHER; note = 2'-O-methyluridine
  modified_base 25: mod_base = OTHER; note = 2'-fluorouridine
  modified_base 26: mod_base = OTHER; note = 2'-O-methylguanosine
  modified_base 27: mod_base = OTHER; note = 2'-fluorouridine
  modified_base 28: mod_base = OTHER; note = 2'-O-methylguanosine
  modified_base 29: mod_base = OTHER; note = 2'-fluorouridine
  modified_base 30: mod_base = OTHER; note = 2'-O-methylcytidine
  modified_base 31: mod_base = OTHER; note = 2'-O-methyladenosine phosphorothioate
  modified_base 32: mod_base = OTHER; note = 2'-O-methylcytidine phosphorothioate
  modified_base 33: mod_base = OTHER; note = 2'-O-methyladenosine phosphorothioate trivalent N-acetyl-galactosamine
ttggataggcaggtggacttgctttgtgtcaca

SEQ ID NO: 168 - RNA, 33 nt, synthetic construct
  source 1..33: mol_type = other RNA
  modified_base 1: mod_base = OTHER; note = 2'-O-methyluridine phosphorothioate
  modified_base 2: mod_base = OTHER; note = 2'-fluoroguanosine phosphorothioate
  modified_base 3: mod_base = OTHER; note = 2'-O-methylcytidine
  modified_base 4: mod_base = OTHER; note = 2'-fluoroadenosine
  modified_base 5: mod_base = OTHER; note = 2'-O-methylcytidine
  modified_base 6: mod_base = OTHER; note = 2'-fluorouridine
  modified_base 7: mod_base = OTHER; note = 2'-O-methylguanosine
  modified_base 8: mod_base = OTHER; note = 2'-fluoroadenosine
  modified_base 9: mod_base = OTHER; note = 2'-O-methylguanosine
  modified_base 10: mod_base = OTHER; note = 2'-fluoroadenosine
  modified_base 11: mod_base = OTHER; note = 2'-O-methyladenosine
  modified_base 12: mod_base = OTHER; note = 2'-fluorouridine phosphorothioate
  modified_base 13: mod_base = OTHER; note = 2'-O-methyladenosine phosphorothioate
  modified_base 14: mod_base = OTHER; note = 2'-fluorocytidine phosphorothioate
  modified_base 15: mod_base = OTHER; note = 2'-O-methyluridine phosphorothioate
  modified_base 16: mod_base = OTHER; note = 2'-fluoroguanosine phosphorothioate
  modified_base 17: mod_base = OTHER; note = 2'-O-methyluridine phosphorothioate
  modified_base 18: mod_base = OTHER; note = 2'-fluorocytidine phosphorothioate
  modified_base 20: mod_base = OTHER; note = 2'-O-methyluridine phosphorothioate
  modified_base 21: mod_base = OTHER; note = 2'-fluorouridine
  modified_base 22: mod_base = OTHER; note = 2'-O-methylguanosine
  modified_base 23: mod_base = OTHER; note = 2'-fluorouridine
  modified_base 24: mod_base = OTHER; note = 2'-O-methyladenosine
  modified_base 25: mod_base = OTHER; note = 2'-fluoroadenosine
  modified_base 26: mod_base = OTHER; note = 2'-O-methylcytidine
  modified_base 27: mod_base = OTHER; note = 2'-fluorouridine
  modified_base 28: mod_base = OTHER; note = 2'-O-methyluridine
  modified_base 29: mod_base = OTHER; note = 2'-fluoroguanosine
  modified_base 30: mod_base = OTHER; note = 2'-O-methyladenosine
  modified_base 31: mod_base = OTHER; note = 2'-fluoroadenosine phosphorothioate
  modified_base 32: mod_base = OTHER; note = 2'-O-methylguanosine phosphorothioate
  modified_base 33: mod_base = OTHER; note = 2'-fluoroadenosine phosphorothioate trivalent N-acetyl-galactosamine
tgcactgagaatactgtccttgtaacttgaaga

SEQ ID NO: 169 - RNA, 33 nt, synthetic construct
  source 1..33: mol_type = other RNA
  modified_base 1: mod_base = OTHER; note = 2'-O-methyluridine phosphorothioate
  modified_base 2: mod_base = OTHER; note = 2'-fluoroguanosine phosphorothioate
  modified_base 3: mod_base = OTHER; note = 2'-O-methylcytidine
  modified_base 4: mod_base = OTHER; note = 2'-fluoroadenosine
  modified_base 5: mod_base = OTHER; note = 2'-O-methyladenosine
  modified_base 6: mod_base = OTHER; note = 2'-fluoroadenosine
  modified_base 7: mod_base = OTHER; note = 2'-O-methyladenosine
  modified_base 8: mod_base = OTHER; note = 2'-fluorocytidine
  modified_base 9: mod_base = OTHER; note = 2'-O-methyladenosine
  modified_base 10: mod_base = OTHER; note = 2'-fluoroguanosine
  modified_base 11: mod_base = OTHER; note = 2'-O-methylguanosine
  modified_base 12: mod_base = OTHER; note = 2'-fluorouridine
  modified_base 13: mod_base = OTHER; note = 2'-O-methylcytidine
  modified_base 14: mod_base = OTHER; note = 2'-fluorouridine phosphorothioate
  modified_base 15: mod_base = OTHER; note = 2'-O-methyladenosine phosphorothioate
  modified_base 16: mod_base = OTHER; note = 2'-fluoroguanosine phosphorothioate
  modified_base 17: mod_base = OTHER; note = 2'-O-methyladenosine phosphorothioate
  modified_base 18: mod_base = OTHER; note = 2'-fluoroadenosine phosphorothioate
  modified_base 20: mod_base = OTHER; note = 2'-O-methylguanosine phosphorothioate
  modified_base 21: mod_base = OTHER; note = 2'-fluorouridine phosphorothioate
  modified_base 22: mod_base = OTHER; note = 2'-O-methyladenosine
  modified_base 23: mod_base = OTHER; note = 2'-fluorocytidine
  modified_base 24: mod_base = OTHER; note = 2'-O-methyluridine
  modified_base 25: mod_base = OTHER; note = 2'-fluorocytidine
  modified_base 26: mod_base = OTHER; note = 2'-O-methylcytidine
  modified_base 27: mod_base = OTHER; note = 2'-fluorouridine
  modified_base 28: mod_base = OTHER; note = 2'-O-methyluridine
  modified_base 29: mod_base = OTHER; note = 2'-fluoroguanosine
  modified_base 30: mod_base = OTHER; note = 2'-O-methyluridine
  modified_base 31: mod_base = OTHER; note = 2'-O-methyluridine phosphorothioate
  modified_base 32: mod_base = OTHER; note = 2'-O-methylguanosine phosphorothioate
  modified_base 33: mod_base = OTHER; note = 2'-O-methyladenosine phosphorothioate trivalent N-acetyl-galactosamine
tgcaaaacaggtctagaaagtactccttgttga

SEQ ID NO: 170 - RNA, 33 nt, synthetic construct
  source 1..33: mol_type = other RNA
  modified_base 1: mod_base = OTHER; note = 2'-O-methyluridine phosphorothioate
  modified_base 2: mod_base = OTHER; note = 2'-fluorocytidine phosphorothioate
  modified_base 3: mod_base = OTHER; note = 2'-O-methyladenosine
  modified_base 4: mod_base = OTHER; note = 2'-fluoroadenosine
  modified_base 5: mod_base = OTHER; note = 2'-O-methylcytidine
  modified_base 6: mod_base = OTHER; note = 2'-fluoroadenosine
  modified_base 7: mod_base = OTHER; note = 2'-O-methyladenosine
  modified_base 8: mod_base = OTHER; note = 2'-fluoroguanosine
  modified_base 9: mod_base = OTHER; note = 2'-O-methylguanosine
  modified_base 10: mod_base = OTHER; note = 2'-fluoroadenosine
  modified_base 11: mod_base = OTHER; note = 2'-O-methylguanosine
  modified_base 12: mod_base = OTHER; note = 2'-fluorouridine
  modified_base 13: mod_base = OTHER; note = 2'-O-methyladenosine
  modified_base 14: mod_base = OTHER; note = 2'-fluorocytidine phosphorothioate
  modified_base 15: mod_base = OTHER; note = 2'-O-methylcytidine phosphorothioate
  modified_base 16: mod_base = OTHER; note = 2'-fluorocytidine phosphorothioate
  modified_base 17: mod_base = OTHER; note = 2'-O-methylguanosine phosphorothioate
  modified_base 18: mod_base = OTHER; note = 2'-fluoroguanosine phosphorothioate
  modified_base 20: mod_base = OTHER; note = 2'-O-methyladenosine phosphorothioate
  modified_base 21: mod_base = OTHER; note = 2'-fluoroguanosine phosphorothioate
  modified_base 22: mod_base = OTHER; note = 2'-O-methyladenosine
  modified_base 23: mod_base = OTHER; note = 2'-fluorocytidine
  modified_base 24: mod_base = OTHER; note = 2'-O-methylcytidine
  modified_base 25: mod_base = OTHER; note = 2'-fluorouridine
  modified_base 26: mod_base = OTHER; note = 2'-O-methylguanosine
  modified_base 27: mod_base = OTHER; note = 2'-fluorouridine
  modified_base 28: mod_base = OTHER; note = 2'-O-methyluridine
  modified_base 29: mod_base = OTHER; note = 2'-fluorouridine
  modified_base 30: mod_base = OTHER; note = 2'-O-methyluridine
  modified_base 31: mod_base = OTHER; note = 2'-O-methylguanosine phosphorothioate
  modified_base 32: mod_base = OTHER; note = 2'-O-methylcytidine phosphorothioate
  modified_base 33: mod_base = OTHER; note = 2'-O-methyladenosine phosphorothioate trivalent N-acetyl-galactosamine
tcaacaaggagtacccgggagacctgttttgca

SEQ ID NO: 171 - RNA, 33 nt, synthetic construct
  source 1..33: mol_type = other RNA
  modified_base 1: mod_base = OTHER; note = 2'-O-methyluridine phosphorothioate
  modified_base 2: mod_base = OTHER; note = 2'-fluoroadenosine phosphorothioate
  modified_base 3: mod_base = OTHER; note = 2'-O-methylguanosine
  modified_base 4: mod_base = OTHER; note = 2'-fluoroadenosine
  modified_base 5: mod_base = OTHER; note = 2'-O-methyladenosine
  modified_base 6: mod_base = OTHER; note = 2'-fluorouridine
  modified_base 7: mod_base = OTHER; note = 2'-O-methyladenosine
  modified_base 8: mod_base = OTHER; note = 2'-fluoroadenosine
  modified_base 9: mod_base = OTHER; note = 2'-O-methyladenosine
  modified_base 10: mod_base = OTHER; note = 2'-fluorouridine
  modified_base 11: mod_base = OTHER; note = 2'-O-methyladenosine
  modified_base 12: mod_base = OTHER; note = 2'-fluorouridine
  modified_base 13: mod_base = OTHER; note = 2'-O-methylcytidine
  modified_base 14: mod_base = OTHER; note = 2'-fluorouridine phosphorothioate
  modified_base 15: mod_base = OTHER; note = 2'-O-methyluridine phosphorothioate
  modified_base 16: mod_base = OTHER; note = 2'-fluorocytidine phosphorothioate
  modified_base 17: mod_base = OTHER; note = 2'-O-methyladenosine phosphorothioate
  modified_base 18: mod_base = OTHER; note = 2'-fluoroadenosine phosphorothioate
  modified_base 20: mod_base = OTHER; note = 2'-O-methylguanosine phosphorothioate
  modified_base 21: mod_base = OTHER; note = 2'-fluorouridine phosphorothioate
  modified_base 22: mod_base = OTHER; note = 2'-O-methyladenosine
  modified_base 23: mod_base = OTHER; note = 2'-fluorocytidine
  modified_base 24: mod_base = OTHER; note = 2'-O-methyluridine
  modified_base 25: mod_base = OTHER; note = 2'-fluorocytidine
  modified_base 26: mod_base = OTHER; note = 2'-O-methylcytidine
  modified_base 27: mod_base = OTHER; note = 2'-fluorouridine
  modified_base 28: mod_base = OTHER; note = 2'-O-methyluridine
  modified_base 29: mod_base = OTHER; note = 2'-fluoroguanosine
  modified_base 30: mod_base = OTHER; note = 2'-O-methyluridine
  modified_base 31: mod_base = OTHER; note = 2'-O-methyluridine phosphorothioate
  modified_base 32: mod_base = OTHER; note = 2'-O-methylguanosine phosphorothioate
  modified_base 33: mod_base = OTHER; note = 2'-O-methyladenosine phosphorothioate trivalent N-acetyl-galactosamine
tagaataaatatcttcaaggtactccttgttga

SEQ ID NO: 172 - RNA, 33 nt, synthetic construct
  source 1..33: mol_type = other RNA
  modified_base 1: mod_base = OTHER; note = 2'-O-methyluridine phosphorothioate
  modified_base 2: mod_base = OTHER; note = 2'-fluorocytidine phosphorothioate
  modified_base 3: mod_base = OTHER; note = 2'-O-methyladenosine
  modified_base 4: mod_base = OTHER; note = 2'-fluoroadenosine
  modified_base 5: mod_base = OTHER; note = 2'-O-methylcytidine
  modified_base 6: mod_base = OTHER; note = 2'-fluoroadenosine
  modified_base 7: mod_base = OTHER; note = 2'-O-methyladenosine
  modified_base 8: mod_base = OTHER; note = 2'-fluoroguanosine
  modified_base 9: mod_base = OTHER; note = 2'-O-methylguanosine
  modified_base 10: mod_base = OTHER; note = 2'-fluoroadenosine
  modified_base 11: mod_base = OTHER; note = 2'-O-methylguanosine
  modified_base 12: mod_base = OTHER; note = 2'-fluorouridine
  modified_base 13: mod_base = OTHER; note = 2'-O-methyladenosine
  modified_base 14: mod_base = OTHER; note = 2'-fluorocytidine phosphorothioate
  modified_base 15: mod_base = OTHER; note = 2'-O-methylcytidine phosphorothioate
  modified_base 16: mod_base = OTHER; note = 2'-fluorocytidine phosphorothioate
  modified_base 17: mod_base = OTHER; note = 2'-O-methylguanosine phosphorothioate
  modified_base 18: mod_base = OTHER; note = 2'-fluoroguanosine phosphorothioate
  modified_base 20: mod_base = OTHER; note = 2'-O-methyladenosine phosphorothioate
  modified_base 21: mod_base = OTHER; note = 2'-fluoroguanosine phosphorothioate
  modified_base 22: mod_base = OTHER; note = 2'-O-methyladenosine
  modified_base 23: mod_base = OTHER; note = 2'-fluorouridine
  modified_base 24: mod_base = OTHER; note = 2'-O-methyladenosine
  modified_base 25: mod_base = OTHER; note = 2'-fluorouridine
  modified_base 26: mod_base = OTHER; note = 2'-O-methyluridine
  modified_base 27: mod_base = OTHER; note = 2'-fluorouridine
  modified_base 28: mod_base = OTHER; note = 2'-O-methyladenosine
  modified_base 29: mod_base = OTHER; note = 2'-fluorouridine
  modified_base 30: mod_base = OTHER; note = 2'-O-methyluridine
  modified_base 31: mod_base = OTHER; note = 2'-O-methylcytidine phosphorothioate
  modified_base 32: mod_base = OTHER; note = 2'-O-methyluridine phosphorothioate
  modified_base 33: mod_base = OTHER; note = 2'-O-methyladenosine phosphorothioate trivalent N-acetyl-galactosamine
tcaacaaggagtacccgggagatatttattcta

SEQ ID NO: 173 - RNA, 33 nt, synthetic construct
  source 1..33: mol_type = other RNA
  modified_base 1: mod_base = OTHER; note = 2'-O-methyluridine phosphorothioate
  modified_base 2: mod_base = OTHER; note = 2'-fluorocytidine phosphorothioate
  modified_base 3: mod_base = OTHER; note = 2'-O-methyladenosine
  modified_base 4: mod_base = OTHER; note = 2'-fluoroadenosine
  modified_base 5: mod_base = OTHER; note = 2'-O-methyladenosine
  modified_base 6: mod_base = OTHER; note = 2'-fluoroadenosine
  modified_base 7: mod_base = OTHER; note = 2'-O-methylguanosine
  modified_base 8: mod_base = OTHER; note = 2'-fluorocytidine
  modified_base 9: mod_base = OTHER; note = 2'-O-methyladenosine
  modified_base 10: mod_base = OTHER; note = 2'-fluoroadenosine
  modified_base 11: mod_base = OTHER; note = 2'-O-methyladenosine
  modified_base 12: mod_base = OTHER; note = 2'-fluoroadenosine
  modified_base 13: mod_base = OTHER; note = 2'-O-methylcytidine
  modified_base 14: mod_base = OTHER; note = 2'-fluoroadenosine phosphorothioate
  modified_base 15: mod_base = OTHER; note = 2'-O-methylguanosine phosphorothioate
  modified_base 16: mod_base = OTHER; note = 2'-fluoroguanosine phosphorothioate
  modified_base 17: mod_base = OTHER; note = 2'-O-methyluridine phosphorothioate
  modified_base 18: mod_base = OTHER; note = 2'-fluorocytidine phosphorothioate
  modified_base 20: mod_base = OTHER; note = 2'-O-methyladenosine phosphorothioate
  modified_base 21: mod_base = OTHER; note = 2'-fluorocytidine phosphorothioate
  modified_base 22: mod_base = OTHER; note = 2'-O-methylcytidine
  modified_base 23: mod_base = OTHER; note = 2'-fluorouridine
  modified_base 24: mod_base = OTHER; note = 2'-O-methylguanosine
  modified_base 25: mod_base = OTHER; note = 2'-fluorocytidine
  modified_base 26: mod_base = OTHER; note = 2'-O-methylcytidine
  modified_base 27: mod_base = OTHER; note = 2'-fluorouridine
  modified_base 28: mod_base = OTHER; note = 2'-O-methyladenosine
  modified_base 29: mod_base = OTHER; note = 2'-fluorouridine
  modified_base 30: mod_base = OTHER; note = 2'-O-methylcytidine
  modified_base 31: mod_base = OTHER; note = 2'-O-methylcytidine phosphorothioate
  modified_base 32: mod_base = OTHER; note = 2'-O-methyladenosine phosphorothioate
  modified_base 33: mod_base = OTHER; note = 2'-O-methyladenosine phosphorothioate trivalent N-acetyl-galactosamine
tcaaaagcaaaacaggtctacctgcctatccaa

SEQ ID NO: 174 - RNA, 33 nt, synthetic construct
  source 1..33: mol_type = other RNA
  modified_base 1: mod_base = OTHER; note = 2'-O-methyluridine phosphorothioate
  modified_base 2: mod_base = OTHER; note = 2'-fluorouridine phosphorothioate
  modified_base 3: mod_base = OTHER; note = 2'-O-methylguanosine
  modified_base 4: mod_base = OTHER; note = 2'-fluoroguanosine
  modified_base 5: mod_base = OTHER; note = 2'-O-methyladenosine
  modified_base 6: mod_base = OTHER; note = 2'-fluorouridine
  modified_base 7: mod_base = OTHER; note = 2'-O-methyladenosine
  modified_base 8: mod_base = OTHER; note = 2'-fluoroguanosine
  modified_base 9: mod_base = OTHER; note = 2'-O-methylguanosine
  modified_base 10: mod_base = OTHER; note = 2'-fluorocytidine
  modified_base 11: mod_base = OTHER; note = 2'-O-methyladenosine
  modified_base 12: mod_base = OTHER; note = 2'-fluoroguanosine
  modified_base 13: mod_base = OTHER; note = 2'-O-methylguanosine
  modified_base 14: mod_base = OTHER; note = 2'-fluorouridine phosphorothioate
  modified_base 15: mod_base = OTHER; note = 2'-O-methylguanosine phosphorothioate
  modified_base 16: mod_base = OTHER; note = 2'-fluoroguanosine phosphorothioate
  modified_base 17: mod_base = OTHER; note = 2'-O-methyladenosine phosphorothioate
  modified_base 18: mod_base = OTHER; note = 2'-fluorocytidine phosphorothioate
  modified_base 20: mod_base = OTHER; note = 2'-O-methyluridine phosphorothioate
  modified_base 21: mod_base = OTHER; note = 2'-fluoroguanosine phosphorothioate
  modified_base 22: mod_base = OTHER; note = 2'-O-methyluridine
  modified_base 23: mod_base = OTHER; note = 2'-fluorouridine
  modified_base 24: mod_base = OTHER; note = 2'-O-methyluridine
  modified_base 25: mod_base = OTHER; note = 2'-fluorouridine
  modified_base 26: mod_base = OTHER; note = 2'-O-methylguanosine
  modified_base 27: mod_base = OTHER; note = 2'-fluorocytidine
  modified_base 28: mod_base = OTHER; note = 2'-O-methyluridine
  modified_base 29: mod_base = OTHER; note = 2'-fluorouridine
  modified_base 30: mod_base = OTHER; note = 2'-O-methyluridine
  modified_base 31: mod_base = OTHER; note = 2'-O-methyluridine phosphorothioate
  modified_base 32: mod_base = OTHER; note = 2'-O-methylguanosine phosphorothioate
  modified_base 33: mod_base = OTHER; note = 2'-O-methyladenosine phosphorothioate trivalent N-acetyl-galactosamine
ttggataggcaggtggacttgttttgcttttga

SEQ ID NO: 175 - RNA, 34 nt, synthetic construct; identical to SEQ ID NO: 78
  source 1..34: mol_type = other RNA
  modified_base 1: mod_base = OTHER; note = 2'-O-methyluridine phosphorothioate
  modified_base 2: mod_base = OTHER; note = 2'-fluoroguanosine phosphorothioate
  modified_base 3: mod_base = OTHER; note = 2'-O-methylcytidine
  modified_base 4: mod_base = OTHER; note = 2'-fluoroadenosine
  modified_base 5: mod_base = OTHER; note = 2'-O-methyladenosine
  modified_base 6: mod_base = OTHER; note = 2'-fluoroadenosine
  modified_base 7: mod_base = OTHER; note = 2'-O-methyladenosine
  modified_base 8: mod_base = OTHER; note = 2'-fluorocytidine
  modified_base 9: mod_base = OTHER; note = 2'-O-methyladenosine
  modified_base 10: mod_base = OTHER; note = 2'-fluoroguanosine
  modified_base 11: mod_base = OTHER; note = 2'-O-methylguanosine
  modified_base 12: mod_base = OTHER; note = 2'-fluorouridine
  modified_base 13: mod_base = OTHER; note = 2'-O-methylcytidine
  modified_base 14: mod_base = OTHER; note = 2'-fluorouridine phosphorothioate
  modified_base 15: mod_base = OTHER; note = 2'-O-methyladenosine phosphorothioate
  modified_base 16: mod_base = OTHER; note = 2'-fluoroguanosine phosphorothioate
  modified_base 17: mod_base = OTHER; note = 2'-O-methyladenosine phosphorothioate
  modified_base 18: mod_base = OTHER; note = 2'-fluoroadenosine phosphorothioate
  modified_base 20: mod_base = OTHER; note = 2'-fluoroguanosine phosphorothioate
  modified_base 21: mod_base = OTHER; note = 2'-O-methylguanosine phosphorothioate
  modified_base 22: mod_base = OTHER; note = 2'-fluorouridine
  modified_base 23: mod_base = OTHER; note = 2'-O-methyladenosine
  modified_base 24: mod_base = OTHER; note = 2'-fluorocytidine
  modified_base 25: mod_base = OTHER; note = 2'-O-methyluridine
  modified_base 26: mod_base = OTHER; note = 2'-fluorocytidine
  modified_base 27: mod_base = OTHER; note = 2'-O-methylcytidine
  modified_base 28: mod_base = OTHER; note = 2'-fluorouridine
  modified_base 29: mod_base = OTHER; note = 2'-O-methyluridine
  modified_base 30: mod_base = OTHER; note = 2'-fluoroguanosine
  modified_base 31: mod_base = OTHER; note = 2'-O-methyluridine
  modified_base 32: mod_base = OTHER; note = 2'-O-methyluridine phosphorothioate
  modified_base 33: mod_base = OTHER; note = 2'-O-methylguanosine phosphorothioate
  modified_base 34: mod_base = OTHER; note = 2'-O-methyladenosine phosphorothioate trivalent N-acetyl-galactosamine

SEQ ID NO: 176 - RNA, 34 nt, synthetic construct; identical to SEQ ID NO: 132
  source 1..34: mol_type = other RNA
  modified_base 1: mod_base = OTHER; note = 2'-O-methyluridine phosphorothioate
  modified_base 2: mod_base = OTHER; note = 2'-fluorocytidine phosphorothioate
  modified_base 3: mod_base = OTHER; note = 2'-O-methyladenosine
  modified_base 4: mod_base = OTHER; note = 2'-fluoroadenosine
  modified_base 5: mod_base = OTHER; note = 2'-O-methylcytidine
  modified_base 6: mod_base = OTHER; note = 2'-fluoroadenosine
  modified_base 7: mod_base = OTHER; note = 2'-O-methyladenosine
  modified_base 8: mod_base = OTHER; note = 2'-fluoroguanosine
  modified_base 9: mod_base = OTHER; note = 2'-O-methylguanosine
  modified_base 10: mod_base = OTHER; note = 2'-fluoroadenosine
  modified_base 11: mod_base = OTHER; note = 2'-O-methylguanosine
  modified_base 12: mod_base = OTHER; note = 2'-fluorouridine
  modified_base 13: mod_base = OTHER; note = 2'-O-methyladenosine
  modified_base 14: mod_base = OTHER; note = 2'-fluorocytidine phosphorothioate
  modified_base 15: mod_base = OTHER; note = 2'-O-methylcytidine phosphorothioate
  modified_base 16: mod_base = OTHER; note = 2'-fluorocytidine phosphorothioate
  modified_base 17: mod_base = OTHER; note = 2'-O-methylguanosine phosphorothioate
  modified_base 18: mod_base = OTHER; note = 2'-fluoroguanosine phosphorothioate
  modified_base 20: mod_base = OTHER; note = 2'-fluorouridine phosphorothioate
  modified_base 21: mod_base = OTHER; note = 2'-O-methyladenosine phosphorothioate
  modified_base 22: mod_base = OTHER; note = 2'-fluoroguanosine
  modified_base 23: mod_base = OTHER; note = 2'-O-methyladenosine
  modified_base 24: mod_base = OTHER; note = 2'-fluorocytidine
  modified_base 25: mod_base = OTHER; note = 2'-O-methylcytidine
  modified_base 26: mod_base = OTHER; note = 2'-fluorouridine
  modified_base 27: mod_base = OTHER; note = 2'-O-methylguanosine
  modified_base 28: mod_base = OTHER; note = 2'-fluorouridine
  modified_base 29: mod_base = OTHER; note = 2'-O-methyluridine
  modified_base 30: mod_base = OTHER; note = 2'-fluorouridine
  modified_base 31: mod_base = OTHER; note = 2'-O-methyluridine
  modified_base 32: mod_base = OTHER; note = 2'-O-methylguanosine phosphorothioate
  modified_base 33: mod_base = OTHER; note = 2'-O-methylcytidine phosphorothioate
  modified_base 34: mod_base = OTHER; note = 2'-O-methyladenosine phosphorothioate trivalent N-acetyl-galactosamine

SEQ ID NO: 177 - RNA, 34 nt, synthetic construct; identical to SEQ ID NO: 64
  source 1..34: mol_type = other RNA
  modified_base 1: mod_base = OTHER; note = 2'-O-methyluridine phosphorothioate
  modified_base 2: mod_base = OTHER; note = 2'-fluoroguanosine phosphorothioate
  modified_base 3: mod_base = OTHER; note = 2'-O-methylcytidine
  modified_base 4: mod_base = OTHER; note = 2'-fluoroadenosine
  modified_base 5: mod_base = OTHER; note = 2'-O-methyladenosine
  modified_base 6: mod_base = OTHER; note = 2'-fluoroadenosine
  modified_base 7: mod_base = OTHER; note = 2'-O-methyladenosine
  modified_base 8: mod_base = OTHER; note = 2'-fluorocytidine
  modified_base 9: mod_base = OTHER; note = 2'-O-methyladenosine
  modified_base 10: mod_base = OTHER; note = 2'-fluoroguanosine
  modified_base 11: mod_base = OTHER; note = 2'-O-methylguanosine
  modified_base 12: mod_base = OTHER; note = 2'-fluorouridine
  modified_base 13: mod_base = OTHER; note = 2'-O-methylcytidine
  modified_base 14: mod_base = OTHER; note = 2'-fluorouridine phosphorothioate
  modified_base 15: mod_base = OTHER; note = 2'-O-methyladenosine phosphorothioate
  modified_base 16: mod_base = OTHER; note = 2'-fluoroguanosine phosphorothioate
  modified_base 17: mod_base = OTHER; note = 2'-O-methyladenosine phosphorothioate
  modified_base 18: mod_base = OTHER; note = 2'-fluoroadenosine phosphorothioate
  modified_base 20: mod_base = OTHER; note = 2'-fluorocytidine phosphorothioate
  modified_base 21: mod_base = OTHER; note = 2'-O-methyladenosine phosphorothioate
  modified_base 22: mod_base = OTHER; note = 2'-fluorocytidine
  modified_base 23: mod_base = OTHER; note = 2'-O-methylcytidine
  modified_base 24: mod_base = OTHER; note = 2'-fluorouridine
  modified_base 25: mod_base = OTHER; note = 2'-O-methylguanosine
  modified_base 26: mod_base = OTHER; note = 2'-fluorocytidine
  modified_base 27: mod_base = OTHER; note = 2'-O-methylcytidine
  modified_base 28: mod_base = OTHER; note = 2'-fluorouridine
  modified_base 29: mod_base = OTHER; note = 2'-O-methyladenosine
  modified_base 30: mod_base = OTHER; note = 2'-fluorouridine
  modified_base 31: mod_base = OTHER; note = 2'-O-methylcytidine
  modified_base 32: mod_base = OTHER; note = 2'-O-methylcytidine phosphorothioate
  modified_base 33: mod_base = OTHER; note = 2'-O-methyladenosine phosphorothioate
  modified_base 34: mod_base = OTHER; note = 2'-O-methyladenosine phosphorothioate trivalent N-acetyl-galactosamine

SEQ ID NO: 178 - RNA, 34 nt, synthetic construct; identical to SEQ ID NO: 118
  source 1..34: mol_type = other RNA
  modified_base 1: mod_base = OTHER; note = 2'-O-methyluridine phosphorothioate
  modified_base 2: mod_base = OTHER; note = 2'-fluorouridine phosphorothioate
  modified_base 3: mod_base = OTHER; note = 2'-O-methylguanosine
  modified_base 4: mod_base = OTHER; note = 2'-fluoroguanosine
  modified_base 5: mod_base = OTHER; note = 2'-O-methyladenosine
  modified_base 6: mod_base = OTHER; note = 2'-fluorouridine
  modified_base 7: mod_base = OTHER; note = 2'-O-methyladenosine
  modified_base 8: mod_base = OTHER; note = 2'-fluoroguanosine
  modified_base 9: mod_base = OTHER; note = 2'-O-methylguanosine
  modified_base 10: mod_base = OTHER; note = 2'-fluorocytidine
  modified_base 11: mod_base = OTHER; note = 2'-O-methyladenosine
  modified_base 12: mod_base = OTHER; note = 2'-fluoroguanosine
  modified_base 13: mod_base = OTHER; note = 2'-O-methylguanosine
  modified_base 14: mod_base = OTHER; note = 2'-fluorouridine phosphorothioate
  modified_base 15: mod_base = OTHER; note = 2'-O-methylguanosine phosphorothioate
  modified_base 16: mod_base = OTHER; note = 2'-fluoroguanosine phosphorothioate
  modified_base 17: mod_base = OTHER; note = 2'-O-methyladenosine phosphorothioate
  modified_base 18: mod_base = OTHER; note = 2'-fluorocytidine phosphorothioate
  modified_base 20: mod_base = OTHER; note = 2'-fluorouridine phosphorothioate
  modified_base 21: mod_base = OTHER; note = 2'-O-methyladenosine phosphorothioate
  modified_base 22: mod_base = OTHER; note = 2'-fluoroguanosine
  modified_base 23: mod_base = OTHER; note = 2'-O-methyladenosine
  modified_base 24: mod_base = OTHER; note = 2'-fluorocytidine
  modified_base 25: mod_base = OTHER; note = 2'-O-methylcytidine
  modified_base 26: mod_base = OTHER; note = 2'-fluorouridine
  modified_base 27: mod_base = OTHER; note = 2'-O-methylguanosine
  modified_base 28: mod_base = OTHER; note = 2'-fluorouridine
  modified_base 29: mod_base = OTHER; note = 2'-O-methyluridine
  modified_base 30: mod_base = OTHER; note = 2'-fluorouridine
  modified_base 31: mod_base = OTHER; note = 2'-O-methyluridine
  modified_base 32: mod_base = OTHER; note = 2'-O-methylguanosine phosphorothioate
  modified_base 33: mod_base = OTHER; note = 2'-O-methylcytidine phosphorothioate
  modified_base 34: mod_base = OTHER; note = 2'-O-methyladenosine phosphorothioate trivalent N-acetyl-galactosamine

SEQ ID NO: 179 - RNA, 34 nt, synthetic construct; identical to SEQ ID NO: 80
  source 1..34: mol_type = other RNA
  modified_base 1: mod_base = OTHER; note = 2'-O-methyluridine phosphorothioate
  modified_base 2: mod_base = OTHER; note = 2'-fluoroadenosine phosphorothioate
  modified_base 3: mod_base = OTHER; note = 2'-O-methylguanosine
  modified_base 4: mod_base = OTHER; note = 2'-fluoroadenosine
  modified_base 5: mod_base = OTHER; note = 2'-O-methyladenosine
  modified_base 6: mod_base = OTHER; note = 2'-fluorouridine
  modified_base 7: mod_base = OTHER; note = 2'-O-methyladenosine
  modified_base 8: mod_base = OTHER; note = 2'-fluoroadenosine
  modified_base 9: mod_base = OTHER; note = 2'-O-methyladenosine
  modified_base 10: mod_base = OTHER; note = 2'-fluorouridine
  modified_base 11: mod_base = OTHER; note = 2'-O-methyladenosine
  modified_base 12: mod_base = OTHER; note = 2'-fluorouridine
  modified_base 13: mod_base = OTHER; note = 2'-O-methylcytidine
  modified_base 14: mod_base = OTHER; note = 2'-fluorouridine phosphorothioate
  modified_base 15: mod_base = OTHER; note = 2'-O-methyluridine phosphorothioate
  modified_base 16: mod_base = OTHER; note = 2'-fluorocytidine phosphorothioate
  modified_base 17: mod_base = OTHER; note = 2'-O-methyladenosine phosphorothioate
  modified_base 18: mod_base = OTHER; note = 2'-fluoroadenosine phosphorothioate
  modified_base 20: mod_base = OTHER; note = 2'-fluoroguanosine phosphorothioate
  modified_base 21: mod_base = OTHER; note = 2'-O-methylguanosine phosphorothioate
  modified_base 22: mod_base = OTHER; note = 2'-fluorouridine
  modified_base 23: mod_base = OTHER; note = 2'-O-methyladenosine
  modified_base 24: mod_base = OTHER; note = 2'-fluorocytidine
  modified_base 25: mod_base = OTHER; note = 2'-O-methyluridine
  modified_base 26: mod_base = OTHER; note = 2'-fluorocytidine
  modified_base 27: mod_base = OTHER; note = 2'-O-methylcytidine
  modified_base 28: mod_base = OTHER; note = 2'-fluorouridine
  modified_base 29: mod_base = OTHER; note = 2'-O-methyluridine
  modified_base 30: mod_base = OTHER; note = 2'-fluoroguanosine
  modified_base 31: mod_base = OTHER; note = 2'-O-methyluridine
  modified_base 32: mod_base = OTHER; note = 2'-O-methyluridine phosphorothioate
  modified_base 33: mod_base = OTHER; note = 2'-O-methylguanosine phosphorothioate
  modified_base 34: mod_base = OTHER; note = 2'-O-methyladenosine phosphorothioate trivalent N-acetyl-galactosamine

SEQ ID NO: 180 - RNA, 34 nt, synthetic construct; identical to SEQ ID NO: 134
  source 1..34: mol_type = other RNA
  modified_base 1: mod_base = OTHER; note = 2'-O-methyluridine phosphorothioate
  modified_base 2: mod_base = OTHER; note = 2'-fluorocytidine phosphorothioate
  modified_base 3: mod_base = OTHER; note = 2'-O-methyladenosine
  modified_base 4: mod_base = OTHER; note = 2'-fluoroadenosine
  modified_base 5: mod_base = OTHER; note = 2'-O-methylcytidine
  modified_base 6: mod_base = OTHER; note = 2'-fluoroadenosine
  modified_base 7: mod_base = OTHER; note = 2'-O-methyladenosine
  modified_base 8: mod_base = OTHER; note = 2'-fluoroguanosine
  modified_base 9: mod_base = OTHER; note = 2'-O-methylguanosine
  modified_base 10: mod_base = OTHER; note = 2'-fluoroadenosine
  modified_base 11: mod_base = OTHER; note = 2'-O-methylguanosine
  modified_base 12: mod_base = OTHER; note = 2'-fluorouridine
  modified_base 13: mod_base = OTHER; note = 2'-O-methyladenosine
  modified_base 14: mod_base = OTHER; note = 2'-fluorocytidine phosphorothioate
  modified_base 15: mod_base = OTHER; note = 2'-O-methylcytidine phosphorothioate
  modified_base 16: mod_base = OTHER; note = 2'-fluorocytidine phosphorothioate
  modified_base 17: mod_base = OTHER; note = 2'-O-methylguanosine phosphorothioate
  modified_base 18: mod_base = OTHER; note = 2'-fluoroguanosine phosphorothioate
  modified_base 20: mod_base = OTHER; note = 2'-fluoroadenosine phosphorothioate
  modified_base 21: mod_base = OTHER; note = 2'-O-methyladenosine phosphorothioate
  modified_base 22: mod_base = OTHER; note = 2'-fluoroguanosine
  modified_base 23: mod_base = OTHER; note = 2'-O-methyladenosine
  modified_base 24: mod_base = OTHER; note = 2'-fluorouridine
  modified_base 25: mod_base = OTHER; note = 2'-O-methyladenosine
  modified_base 26: mod_base = OTHER; note = 2'-fluorouridine
  modified_base 27: mod_base = OTHER; note = 2'-O-methyluridine
  modified_base 28: mod_base = OTHER; note = 2'-fluorouridine
  modified_base 29: mod_base = OTHER; note = 2'-O-methyladenosine
  modified_base 30: mod_base = OTHER; note = 2'-fluorouridine
  modified_base 31: mod_base = OTHER; note = 2'-O-methyluridine
  modified_base 32: mod_base = OTHER; note = 2'-O-methylcytidine phosphorothioate
  modified_base 33: mod_base = OTHER; note = 2'-O-methyluridine phosphorothioate
  modified_base 34: mod_base = OTHER; note = 2'-O-methyladenosine phosphorothioate trivalent N-acetyl-galactosamine

SEQ ID NO: 181 - RNA, 34 nt, synthetic construct; identical to SEQ ID NO: 66
  source 1..34: mol_type = other RNA
  modified_base 1: mod_base = OTHER; note = 2'-O-methyluridine phosphorothioate
  modified_base 2: mod_base = OTHER; note = 2'-fluoroadenosine phosphorothioate
  modified_base 3: mod_base = OTHER; note = 2'-O-methylguanosine
  modified_base 4: mod_base = OTHER; note = 2'-fluoroadenosine
  modified_base 5: mod_base = OTHER; note = 2'-O-methyladenosine
  modified_base 6: mod_base = OTHER; note = 2'-fluorouridine
  modified_base 7: mod_base = OTHER; note = 2'-O-methyladenosine
  modified_base 8: mod_base = OTHER; note = 2'-fluoroadenosine
  modified_base 9: mod_base = OTHER; note = 2'-O-methyladenosine
  modified_base 10: mod_base = OTHER; note = 2'-fluorouridine
  modified_base 11: mod_base = OTHER; note = 2'-O-methyladenosine
  modified_base 12: mod_base = OTHER; note = 2'-fluorouridine
  modified_base 13: mod_base = OTHER; note = 2'-O-methylcytidine
  modified_base 14: mod_base = OTHER; note = 2'-fluorouridine phosphorothioate
  modified_base 15: mod_base = OTHER; note = 2'-O-methyluridine phosphorothioate
  modified_base 16: mod_base = OTHER; note = 2'-fluorocytidine phosphorothioate
  modified_base 17: mod_base = OTHER; note = 2'-O-methyladenosine phosphorothioate
  modified_base 18: mod_base = OTHER; note = 2'-fluoroadenosine phosphorothioate
  modified_base 20: mod_base = OTHER; note = 2'-fluorocytidine phosphorothioate
  modified_base 21: mod_base = OTHER; note = 2'-O-methyladenosine phosphorothioate
  modified_base 22: mod_base = OTHER; note = 2'-fluorocytidine
  modified_base 23: mod_base = OTHER; note = 2'-O-methylcytidine
  modified_base 24: mod_base = OTHER; note = 2'-fluorouridine
  modified_base 25: mod_base = OTHER; note = 2'-O-methylguanosine
  modified_base 26: mod_base = OTHER; note = 2'-fluorocytidine
  modified_base 27: mod_base = OTHER; note = 2'-O-methylcytidine
  modified_base 28: mod_base = OTHER; note = 2'-fluorouridine
  modified_base 29: mod_base = OTHER; note = 2'-O-methyladenosine
  modified_base 30: mod_base = OTHER; note = 2'-fluorouridine
  modified_base 31: mod_base = OTHER; note = 2'-O-methylcytidine
  modified_base 32: mod_base = OTHER; note = 2'-O-methylcytidine phosphorothioate
  modified_base 33: mod_base = OTHER; note = 2'-O-methyladenosine phosphorothioate
  modified_base 34: mod_base = OTHER; note = 2'-O-methyladenosine phosphorothioate trivalent N-acetyl-galactosamine

SEQ ID NO: 182 - RNA, 34 nt, synthetic construct; identical to SEQ ID NO: 120
  source 1..34: mol_type = other RNA
  modified_base 1: mod_base = OTHER; note = 2'-O-methyluridine phosphorothioate
  modified_base 2: mod_base = OTHER; note = 2'-fluorouridine phosphorothioate
  modified_base 3: mod_base = OTHER; note = 2'-O-methylguanosine
  modified_base 4: mod_base = OTHER; note = 2'-fluoroguanosine
  modified_base 5: mod_base = OTHER; note = 2'-O-methyladenosine
  modified_base 6: mod_base = OTHER; note = 2'-fluorouridine
  modified_base 7: mod_base = OTHER; note = 2'-O-methyladenosine
  modified_base 8: mod_base = OTHER; note = 2'-fluoroguanosine
  modified_base 9: mod_base = OTHER; note = 2'-O-methylguanosine
  modified_base 10: mod_base = OTHER; note = 2'-fluorocytidine
  modified_base 11: mod_base = OTHER; note = 2'-O-methyladenosine
  modified_base 12: mod_base = OTHER; note = 2'-fluoroguanosine
  modified_base 13: mod_base = OTHER; note = 2'-O-methylguanosine
  modified_base 14: mod_base = OTHER; note = 2'-fluorouridine phosphorothioate
  modified_base 15: mod_base = OTHER; note = 2'-O-methylguanosine phosphorothioate
  modified_base 16: mod_base = OTHER; note = 2'-fluoroguanosine phosphorothioate
  modified_base 17: mod_base = OTHER; note = 2'-O-methyladenosine phosphorothioate
  modified_base 18: mod_base = OTHER; note = 2'-fluorocytidine phosphorothioate
  modified_base 20: mod_base = OTHER; note = 2'-fluoroadenosine phosphorothioate
  modified_base 21: mod_base = OTHER; note = 2'-O-methyladenosine phosphorothioate
  modified_base 22: mod_base = OTHER; note = 2'-fluoroguanosine
  modified_base 23: mod_base = OTHER; note = 2'-O-methyladenosine
  modified_base 24: mod_base = OTHER; note = 2'-fluorouridine
  modified_base 25: mod_base = OTHER; note = 2'-O-methyladenosine
  modified_base 26: mod_base = OTHER; note = 2'-fluorouridine
  modified_base 27: mod_base = OTHER; note = 2'-O-methyluridine
  modified_base 28: mod_base = OTHER; note = 2'-fluorouridine
  modified_base 29: mod_base = OTHER; note = 2'-O-methyladenosine
  modified_base 30: mod_base = OTHER; note = 2'-fluorouridine
  modified_base 31: mod_base = OTHER; note = 2'-O-methyluridine
  modified_base 32: mod_base = OTHER; note = 2'-O-methylcytidine phosphorothioate
  modified_base 33: mod_base = OTHER; note = 2'-O-methyluridine phosphorothioate
  modified_base 34: mod_base = OTHER; note = 2'-O-methyladenosine phosphorothioate trivalent N-acetyl-galactosamine

SEQ ID NO: 183 - RNA, 34 nt, synthetic construct; identical to SEQ ID NO: 75
  source 1..34: mol_type = other RNA
  modified_base 1: mod_base = OTHER; note = 2'-O-methyluridine phosphorothioate
  modified_base 2: mod_base = OTHER; note = 2'-fluorocytidine phosphorothioate
  modified_base 3: mod_base = OTHER; note = 2'-O-methyluridine
  modified_base 4: mod_base = OTHER; note = 2'-fluorouridine
  modified_base 5: mod_base = OTHER; note = 2'-O-methylcytidine
  modified_base 6: mod_base = OTHER; note = 2'-fluoroadenosine
  modified_base 7: mod_base = OTHER; note = 2'-O-methyladenosine
  modified_base 8: mod_base = OTHER; note = 2'-fluoroguanosine
  modified_base 9: mod_base = OTHER; note = 2'-O-methyluridine
  modified_base 10: mod_base = OTHER; note = 2'-fluorouridine
  modified_base 11: mod_base = OTHER; note = 2'-O-methyladenosine
  modified_base 12: mod_base = OTHER; note = 2'-fluorocytidine
  modified_base 13: mod_base = OTHER; note = 2'-O-methyladenosine
  modified_base 14: mod_base = OTHER; note = 2'-fluoroadenosine phosphorothioate
  modified_base 15: mod_base = OTHER; note = 2'-O-methyladenosine phosphorothioate
  modified_base 16: mod_base = OTHER; note = 2'-O-methyladenosine phosphorothioate
  modified_base 17: mod_base = OTHER; note = 2'-fluoroguanosine phosphorothioate
  modified_base 18: mod_base = OTHER; note = 2'-O-methylcytidine phosphorothioate
  modified_base 20: mod_base = OTHER; note = 2'-fluoroguanosine phosphorothioate
  modified_base 21: mod_base = OTHER; note = 2'-O-methylguanosine phosphorothioate
  modified_base 22: mod_base = OTHER; note = 2'-fluorouridine
  modified_base 23: mod_base = OTHER; note = 2'-O-methyladenosine
  modified_base 24: mod_base = OTHER; note = 2'-fluorocytidine
  modified_base 25: mod_base = OTHER; note = 2'-O-methyluridine
  modified_base 26: mod_base = OTHER; note = 2'-fluorocytidine
  modified_base 27: mod_base = OTHER; note = 2'-O-methylcytidine
  modified_base 28: mod_base = OTHER; note = 2'-fluorouridine
  modified_base 29: mod_base = OTHER; note = 2'-O-methyluridine
  modified_base 30: mod_base = OTHER; note = 2'-fluoroguanosine
  modified_base 31: mod_base = OTHER; note = 2'-O-methyluridine
  modified_base 32: mod_base = OTHER; note = 2'-O-methyluridine phosphorothioate
  modified_base 33: mod_base = OTHER; note = 2'-O-methylguanosine phosphorothioate
  modified_base 34: mod_base = OTHER; note = 2'-O-methyladenosine phosphorothioate trivalent N-acetyl-galactosamine

SEQ ID NO: 184 - RNA, 34 nt, synthetic construct; identical to SEQ ID NO: 129
  source 1..34: mol_type = other RNA
  modified_base 1: mod_base = OTHER; note = 2'-O-methyluridine phosphorothioate
  modified_base 2: mod_base = OTHER; note = 2'-fluorocytidine phosphorothioate
  modified_base 3: mod_base = OTHER; note = 2'-O-methyladenosine
  modified_base 4: mod_base = OTHER; note = 2'-fluoroadenosine
  modified_base 5: mod_base = OTHER; note = 2'-O-methylcytidine
  modified_base 6: mod_base = OTHER; note = 2'-fluoroadenosine
  modified_base 7: mod_base = OTHER; note = 2'-O-methyladenosine
  modified_base 8: mod_base = OTHER; note = 2'-fluoroguanosine
  modified_base 9: mod_base = OTHER; note = 2'-O-methylguanosine
  modified_base 10: mod_base = OTHER; note = 2'-fluoroadenosine
  modified_base 11: mod_base = OTHER; note = 2'-O-methylguanosine
  modified_base 12: mod_base = OTHER; note = 2'-fluorouridine
  modified_base 13: mod_base = OTHER; note = 2'-O-methyladenosine
  modified_base 14: mod_base = OTHER; note = 2'-fluorocytidine phosphorothioate
  modified_base 15: mod_base = OTHER; note = 2'-O-methylcytidine phosphorothioate
  modified_base 16: mod_base = OTHER; note = 2'-fluorocytidine phosphorothioate
  modified_base 17: mod_base = OTHER; note = 2'-O-methylguanosine phosphorothioate
  modified_base 18: mod_base = OTHER; note = 2'-fluoroguanosine phosphorothioate
  modified_base 20: mod_base = OTHER; note = 2'-fluorouridine phosphorothioate
  modified_base 21: mod_base = OTHER; note = 2'-O-methyluridine phosphorothioate
  modified_base 22: mod_base = OTHER; note = 2'-fluorouridine
  modified_base 23: mod_base = OTHER; note = 2'-O-methylguanosine
  modified_base 24: mod_base = OTHER; note = 2'-fluorouridine
  modified_base 25: mod_base = OTHER; note = 2'-O-methyladenosine
  modified_base 26: mod_base = OTHER; note = 2'-fluoroadenosine
  modified_base 27: mod_base = OTHER; note = 2'-O-methylcytidine
  modified_base 28: mod_base = OTHER; note = 2'-fluorouridine
  modified_base 29: mod_base = OTHER; note = 2'-O-methyluridine
  modified_base 30: mod_base = OTHER; note = 2'-fluoroguanosine
  modified_base 31: mod_base = OTHER; note = 2'-O-methyladenosine
  modified_base 32: mod_base = OTHER; note = 2'-O-methyladenosine phosphorothioate
  modified_base 33: mod_base = OTHER; note = 2'-O-methylguanosine phosphorothioate
  modified_base 34: mod_base = OTHER; note = 2'-O-methyladenosine phosphorothioate trivalent N-acetyl-galactosamine
